(19) United States
(12) Patent Application Publication
(10) Pub. No.: US 2010/0081182 A1
(43) Pub. Date: Apr. 1, 2010

(54) ENHANCED IRON-SULFUR CLUSTER FORMATION FOR INCREASED DIHYDROXY-ACID DEHYDRATASE ACTIVITY IN LACTIC ACID BACTERIA

(75) Inventors: BRIAN JAMES PAUL, Wilmington, DE (US); Wonchul Suh, Hockessin, DE (US)

Correspondence Address: E I DU PONT DE NEMOURS AND COMPANY;LEGAL PATENT RECORDS CENTER, BARLEY MILL PLAZA 25/1122B, 4417 LANCASTER PIKE, WILMINGTON, DE, 19805, US

(73) Assignee: BUTAMAX(TM) ADVANCED BIOFUELS LLC, Wilmington, DE (US)

(21) Appl. No.: 12/569,103

(22) Filed: Sep. 29, 2009

Related U.S. Application Data
(60) Provisional application No. 61/100,809, filed on Sep. 29, 2008.

(51) Int. Cl. C12P 7/16; C12N 1/21

(52) U.S. Cl. 435/160; 435/252.3

(57) ABSTRACT

Lactic acid bacteria expressing dihydroxyacid dehydratase polypeptides with increased specific activity are disclosed. The lactic acid bacteria comprise recombinant genes encoding iron-sulfur cluster forming proteins.

### CROSS-REFERENCE TO RELATED APPLICATIONS

[0001] This application is related to and claims the benefit of priority of U.S. Provisional Application No. 61/100,809, filed Sep. 29, 2008, the entirety of which is herein incorporated by reference.

### FIELD OF THE INVENTION

[0002] The invention relates to the field of microbiology. More specifically, lactic acid bacteria are disclosed expressing high levels of dihydroxy-acid dehydratase activity in the presence of introduced iron-sulfur cluster forming proteins.

### BACKGROUND OF THE INVENTION

[0003] Dihydroxy-acid dehydratase (DHAD), also called acetohydroxy acid dehydratase, catalyzes the conversion of 2,3-dihydroxyisovalerate to α-ketoisovalerate and of 2,3-dihydroxymethylvalerate to α-ketomethylvalerate. The DHAD enzyme requires binding of an iron-sulfur (Fe—S) cluster for activity, is classified as E.C. 4.2.1.9, and is part of naturally occurring biosynthetic pathways producing valine, isoleucine, leucine and pantothenic acid (vitamin B5). DHAD catalyzed conversion of 2,3-dihydroxyisovalerate to α-ketoisovalerate is also a common step in the multiple isobutanol biosynthetic pathways that are disclosed in commonly owned and co-pending US Patent Pub No. US 20070092957 A1. Disclosed therein is engineering of recombinant microorganisms for production of isobutanol. Isobutanol is useful as a fuel additive, whose availability may reduce the demand for petrochemical fuels. High levels of DHAD activity are desired for increased production of products from biosynthetic pathways that include this enzyme activity, including for enhanced microbial production of branched chain amino acids, pantothenic acid, and isobutanol, however since DHAD enzymes are Fe—S cluster requiring they must be expressed in a host having the genetic machinery to produce Fe—S proteins.

[0004] [2Fe-2S]2+ and [4Fe-4S]2+ clusters can form spontaneously in vitro (Malkin and Rabinowitz (1966) Biochem. Biophys. Res. Comm. 23: 822-827). However, likely due to the toxic nature of both free Fe(II) and sulfide, biogenesis systems have evolved to form Fe—S clusters and insert them into their target apoproteins in vivo. The biogenesis of iron sulfur clusters is not completely understood but is known generally to include liberation of sulfur from the amino acid cysteine by a cysteine desulfurase enzyme, combination of the sulfur with Fe(II) on a scaffold protein, and transfer of the formed Fe—S clusters, frequently in a chaperone-dependent manner, to the proteins and enzymes that require them. The Isc, Suf and Nif operons have been found to encode proteins involved in Fe—S cluster formation in different bacteria (Johnson et al. Annu. Rev. Biochem. 74:247-281 (2005)).

[0005] Lactic acid bacteria are well characterized and are used commercially in a number of industrial processes. Although it is known that some lactic acid bacteria possess Fe—S cluster requiring enzymes (Liu et al., Journal of Biological Chemistry (2000), 275(17), 12367-12373) and therefore posses the genetic machinery to produce Fe—S clusters, little is known about the ability of lactic acid bacteria to insert Fe—S clusters into heterologous enzymes, and little is known about the facility with which Fe—S cluster forming proteins can be expressed in lactic acid bacteria.

[0006] To obtain high levels of product in a lactic acid bacteria from a biosynthetic pathway including DHAD activity, high expression of DHAD activity is desired. The activity of the Fe—S requiring DHAD enzyme in a host cell may be limited by the availability of Fe—S cluster in the cell. There remains a need therefore to engineer a lactic acid bacteria, which is a good industrial host, to provide sufficient levels of Fe—S cluster forming proteins to accommodate the expression of Fe—S requiring proteins such as DHAD.

### SUMMARY OF THE INVENTION

[0007] Provided herein are lactic acid bacterial cells comprising a functional dihydroxy-acid dehydratase polypeptide and at least one recombinant genetic expression element encoding iron-sulfur cluster forming proteins. In some embodiments, the functional dihydroxy-acid dehydratase polypeptide is encoded by a nucleic acid molecule that is heterologous to the bacteria. In some embodiments, the functional dihydroxyacid dehydratase polypeptide is a [2Fe-2S]2+ dihydroxy-acid dehydratase, while in other embodiments, the functional dihydroxyacid dehydratase polypeptide is a [4Fe-4S]2+ dihydroxy-acid dehydratase.

[0008] In one embodiment, the dihydroxyacid dehydratase polypeptide has an amino acid sequence that matches the Profile HMM of Table 7 with an E value of <10⁻⁵ wherein the polypeptide additionally comprises all three conserved cysteines, corresponding to positions 56, 129, and 201 in the amino acids sequences of the Streptococcus mutans DHAD enzyme corresponding to SEQ ID NO:168. In one embodiment, the dihydroxyacid dehydratase polypeptide has an amino acid sequence selected from the group consisting of SEQ ID NO:310, SEQ ID NO:298, SEQ ID NO:168, SEQ ID No:164, SEQ ID NO:346, SEQ ID NO:344, SEQ ID NO:232, and SEQ ID NO:230.

[0009] In some embodiments, the recombinant genetic expression element encoding iron-sulfur cluster forming proteins contains coding regions of an operon selected from the group consisting of Isc, Suf and Nif operons. In some embodiments, the Suf operon comprises at least one coding region selected from the group consisting of SufC, Suf D, Suf S, SufU, Suf B, SufA and yseH, and in some embodiments, the Isc operon comprises at least one coding region selected from the group consisting of IscS, IscU, IscA, IscX, HscA, HscB, and Fdx. In some embodiments the Nif operon comprises at least one coding region selected from the group consisting of NifS and NifU. In some embodiments, the Suf operon has the nucleotide sequence selected from the group consisting of SEQ ID NO:881 and SEQ ID NO:589. In some embodiments, the Suf operon is derived from Lactococcus lactis and comprises at least one coding region encoding a polypeptide having an amino acid sequenced selected from the group consisting of SEQ ID NO: 598 (SufC), SEQ ID NO: 604 (SufD), SEQ ID NO: 610 (SufB), and SEQ ID NO: 618 (YseH). In some embodiments, the Suf operon is derived from Lactoabcillus plantarum and comprises at least one coding region encoding a polypeptide having an amino acid sequenced selected from the group consisting of SEQ ID NO: 596 (SufC), SEQ ID NO: 602 (SufD), SEQ ID NO: 624 (SufS), SEQ ID NO: 620 (SufU) and SEQ ID NO: 608 (SufB). In some embodiments, the Isc operon is derived from E. Coli and comprises at least one coding region encoding a polypeptide having an amino acid sequence selected from the group consisting of SEQ ID NO: 528 (IscS), SEQ ID NO: 530 (IscU), SEQ ID NO: 532 s(IscA), SEQ ID NO:534 (HscB), SEQ ID NO: 536 (hscA), SEQ ID NO: 538 (Fdx), and SEQ ID NO: 540 (IscX). In some embodiments the Nif operon is derived from Wolinella succinogenes and comprises at least one coding region encoding a polypeptide having an amino acid sequence selected from the group consisting of: SEQ ID NO: 542 (NifS) and SEQ ID NO: 544 (NifU).

[0010] In some embodiments, the lactic acid bacterial cell provided herein is a member of a genus selected from the group consisting of Lactococcus, Lactobacillus, Leuconostoc, Oenococcus, Pediococcus, and Streptococcus. In some embodiments, the bacteria produces isobutanol, and in some embodiments, the bacteria comprises an isobutanol biosynthetic pathway. In some embodiments, the isobutanol biosynthetic pathway comprises genes encoding acetolactate synthase, acetohydroxy acid isomeroreductase, dihydroxy-acid dehydratase, branched-chain α-keto acid decarboxylase, and branched-chain alcohol dehydrogenase.

[0011] Also provided herein is a method for increasing the activity of a heterologous dihydroxyacid dehydratase polypeptide in a lactic acid bacterial cell comprising: a) providing a lactic acid bacterial cell comprising: 1) a nucleic acid molecule encoding a heterologous dihydroxyacid dehydratase polypeptide; 2) a recombinant genetic expression element encoding iron-sulfur cluster forming proteins, wherein the proteins are expressed; and b) growing the lactic acid bacterial cell of (a) under conditions whereby the dihydroxy-acid dehydratase polypeptide is expressed in functional form having a specific activity greater than the same dihydroxy-acid dehydratase polypeptide expressed in the same bacterial cell lacking the recombinant genetic expression element encoding iron-sulfur cluster forming proteins. In one embodiment, the specific activity of the expressed dihydroxyacid dehydratase polypeptide is at least about two fold greater than the specific activity of the same dihydroxyacid dehydratase polypeptide expressed in the same bacteria lacking the recombinant genetic expression element encoding iron-sulfur cluster forming proteins.

[0012] Also provided herein is a method of making isobutanol comprising providing a lactic acid bacterial cell disclosed herein and growing said cell under conditions wherein isobutanol is produced.

### BRIEF DESCRIPTION OF THE FIGURES AND SEQUENCE DESCRIPTIONS

[0013] The invention can be more fully understood from the following detailed description, figure, and the accompanying sequence descriptions, which form a part of this application.

[0014] FIG. 1 shows a schematic drawing of the coding regions in the Suf operon from Lactobacillus plantarum as well as the adjacent coding regions feoA and ORF (A), and the portion of the Suf operon that was deleted in Example 1 (B).

[0015] FIG. 2 shows a schematic drawing of the coding regions in the Suf operon from Lactococcus lactis, with each coding region named by the designation from the publicly available genomic sequence and the corresponding coding region identified by sequence homology. No homologous protein is identified for the hypothetical protiein.

[0016] FIG. 3 shows a schematic drawing of the coding regions in the Suf operon from E. coli.

[0017] FIG. 4 shows a schematic drawing of the coding regions of the Isc operon from E. coli, and the adjacent iscR gene.

[0018] FIG. 5 shows a schematic drawing of the coding regions of the Nif operon from Wolinella succinogenes, with the bounding ORF1 and ORF2.

[0019] FIG. 6 shows biosynthetic pathways for biosynthesis of isobutanol.

[0020] Table 7 is a table of the Profile HMM for dihydroxy-acid dehydratases based on enzymes with assayed function prepared as described in Example 1. Table 8 is submitted herewith electronically and is incorporated herein by reference. The following sequences conform with 37 C.F.R. 1.821-1.825 (“Requirements for Patent Applications Containing Nucleotide Sequences and/or Amino Acid Sequence Disclosures—the Sequence Rules”) and are consistent with World Intellectual Property Organization (WIPO) Standard ST.25 (1998) and the sequence listing requirements of the EPO and PCT (Rules 5.2 and 49.5(a-bis), and Section 208 and Annex C of the Administrative Instructions). The symbols and format used for nucleotide and amino acid sequence data comply with the rules set forth in 37 C.F.R. §1.822.

TABLE 1
SEQ ID NOs of representative bacterial [2Fe—2S] 2 +
DHAD proteins and encoding sequences

| | SEQ ID NO: | SEQ ID NO: |
|---|---|---|
| Organism of derivation | Nucleic acid | Peptide |
| Mycobacterium sp. MCS | 1 | 2 |
| Mycobacterium gilvum PYR-GCK | 3 | 4 |
| Mycobacterium smegmatis str. MC2 155 | 5 | 6 |
| Mycobacterium vanbaalenii PYR-1 | 7 | 8 |
| Nocardia farcinica IFM 10152 | 9 | 10 |
| Rhodococcus sp. RHA1 | 11 | 12 |
| Mycobacterium ulcerans Agy99 | 13 | 14 |
| Mycobacterium avium subsp. | 15 | 16 |
| paratuberculosis K-10 | | |
| Mycobacterium tuberculosis H37Ra | 17 | 18 |
| Mycobacterium leprae TN * | 19 | 20 |
| Kineococcus radiotolerans SRS30216 | 21 | 22 |
| Janibacter sp. HTCC2649 | 23 | 24 |
| Nocardioides sp. JS614 | 25 | 26 |
| Renibacterium salmoninarum ATCC 33209 | 27 | 28 |
| Arthrobacter aurescens TC1 | 29 | 30 |
| Leifsonia xyli subsp. xyli str. CTCB07 | 31 | 32 |
| marine actinobacterium PHSC20C1 | 33 | 34 |
| Clavibacter michiganensis subsp. | 35 | 36 |
| michiganensis NCPPB 382 | | |
| Saccharopolyspora erythraea NRRL 2338 | 37 | 38 |
| Acidothermus cellulolyticus 11B | 39 | 40 |
| Corynebacterium efficiens YS-314 | 41 | 42 |
| Brevibacterium linens BL2 | 43 | 44 |
| Tropheryma whipplei TW08/27 | 45 | 46 |
| Methylobacterium extorquens PA1 | 47 | 48 |
| Methylobacterium nodulans ORS 2060 | 49 | 50 |
| Rhodopseudomonas palustris BisB5 | 51 | 52 |
| Rhodopseudomonas palustris BisB18 | 53 | 54 |
| Bradyrhizobium sp. ORS278 | 55 | 56 |
| Bradyrhizobium japonicum USDA 110 | 57 | 58 |
| Fulvimarina pelagi HTCC2506 | 59 | 60 |
| Aurantimonas sp. SI85-9A1 | 61 | 62 |
| Hoeflea phototrophica DFL-43 | 63 | 64 |
| Mesorhizobium loti MAFF303099 | 65 | 66 |
| Mesorhizobium sp. BNC1 | 67 | 68 |
| Parvibaculum lavamentivorans DS-1 | 69 | 70 |
| Loktanella vestfoldensis SKA53 | 71 | 72 |
| Roseobacter sp. CCS2 | 73 | 74 |
| Dinoroseobacter shibae DFL 12 | 75 | 76 |
| Roseovarius nubinhibens ISM | 77 | 78 |
| Sagittula stellata E-37 | 79 | 80 |
| Roseobacter sp. AzwK-3b | 81 | 82 |
| Roseovarius sp. TM1035 | 83 | 84 |
| Oceanicola batsensis HTCC2597 | 85 | 86 |
| Oceanicola granulosus HTCC2516 | 87 | 88 |
| Rhodobacterales bacterium HTCC2150 | 89 | 90 |
| Paracoccus denitrificans PD1222 | 91 | 92 |
| Oceanibulbus indolifex HEL-45 | 93 | 94 |
| Sulfitobacter sp. EE-36 | 95 | 96 |
| Roseobacter denitrificans OCh 114 | 97 | 98 |
| Jannaschia sp. CCS1 | 99 | 100 |
| Caulobacter sp. K31 | 101 | 102 |
| Candidatus Pelagibacter ubique HTCC1062 | 103 | 104 |
| Erythrobacter litoralis HTCC2594 | 105 | 106 |
| Erythrobacter sp. NAP1 | 107 | 108 |
| Comamonas testosterone KF-1 | 109 | 110 |
| Sphingomonas wittichii RW1 | 111 | 112 |
| Burkholderia xenovorans LB400 | 113 | 114 |
| Burkholderia phytofirmans PsJN | 115 | 116 |
| Bordetella petrii DSM 12804 | 117 | 118 |
| Bordetella bronchiseptica RB50 | 119 | 120 |
| Bradyrhizobium sp. ORS278 | 121 | 122 |
| Bradyrhizobium sp. BTAi1 | 123 | 124 |
| Bradhyrhizobium japonicum | 125 | 126 |
| Sphingomonas wittichii RW1 | 127 | 128 |
| Rhodobacterales bacterium HTCC2654 | 129 | 130 |
| Solibacter usitatus Ellin6076 | 131 | 132 |
| Roseiflexus sp. RS-1 | 133 | 134 |
| Rubrobacter xylanophilus DSM 9941 | 135 | 136 |
| Salinispora tropica CNB-440 | 137 | 138 |
| Acidobacteria bacterium Ellin345 | 139 | 140 |
| Thermus thermophilus HB27 | 141 | 142 |
| Maricaulis maris MCS10 | 143 | 144 |
| Parvularcula bermudensis HTCC2503 | 145 | 146 |
| Oceanicaulis alexandrii HTCC2633 | 147 | 148 |
| Plesiocystis pacifica SIR-1 | 149 | 150 |
| Bacillus sp. NRRLB-14911 | 151 | 152 |
| Oceanobacillus iheyensis HTE831 | 153 | 154 |
| Staphylococcus saprophyticus subsp. | 155 | 156 |
| saprophyticus ATCC 15305 | | |
| Bacillus selenitireducens MLS10 | 157 | 158 |
| Streptococcus pneumoniae SP6-BS73 | 159 | 160 |
| Streptococcus sanguinis SK36 | 161 | 162 |
| Streptococcus thermophilus LMG 18311 | 163 | 164 |
| Streptococcus suis 89/1591 | 165 | 166 |
| Streptococcus mutans UA159 | 167 | 168 |
| Leptospira borgpetersenii serovar | 169 | 170 |
| Hardjo-bovis L550 | | |
| Candidatus Vesicomyosocius okutanii HA | 171 | 172 |
| Candidatus Ruthia magnifica str. Cm | 173 | 174 |
| (Calyptogena magnifica) | | |
| Methylococcus capsulatus str. Bath | 175 | 176 |
| uncultured marine bacterium EB80_02D08 | 177 | 178 |
| uncultured marine gamma | 179 | 180 |
| proteobacterium EBAC31A08 | | |
| uncultured marine gamma | 181 | 182 |
| proteobacterium EBAC20E09 | | |
| uncultured gamma proteobacterium | 183 | 184 |
| eBACHOT4E07 | | |
| Alcanivorax borkumensis SK2 | 185 | 186 |
| Chromohalobacter salexigens DSM 3043 | 187 | 188 |
| Marinobacter algicola DG893 | 189 | 190 |
| Marinobacter aquaeolei VT8 | 191 | 192 |
| Marinobacter sp. ELB17 | 193 | 194 |
| Pseudoalteromonas haloplanktis TAC125 | 195 | 196 |
| Acinetobacter sp. ADP1 | 197 | 198 |
| Opitutaceae bacterium TAV2 | 199 | 200 |
| Flavobacterium sp. MED217 | 201 | 202 |
| Cellulophaga sp. MED134 | 203 | 204 |
| Kordia algicida OT-1 | 205 | 206 |
| Flavobacteriales bacterium ALC-1 | 207 | 208 |
| Psychroflexus torquis ATCC 700755 | 209 | 210 |
| Flavobacteriales bacterium HTCC2170 | 211 | 212 |
| unidentified eubacterium SCB49 | 213 | 214 |
| Gramella forsetii KT0803 | 215 | 216 |
| Robiginitalea biformata HTCC2501 | 217 | 218 |
| Tenacibaculum sp. MED152 | 219 | 220 |
| Polaribacter irgensii 23-P | 221 | 222 |
| Pedobacter sp. BAL39 | 223 | 224 |
| Flavobacteria bacterium BAL38 | 225 | 226 |
| Flavobacterium psychrophilum JIP02/86 | 227 | 228 |
| Flavobacterium johnsoniae UW101 | 229 | 230 |
| Lactococcus lactis subsp. cremoris SK11 | 231 | 232 |
| Psychromonas ingrahamii 37 | 233 | 234 |
| Microscilla marina ATCC 23134 | 235 | 236 |
| Cytophaga hutchinsonii ATCC 33406 | 237 | 238 |
| Rhodopirellula baltica SH 1 | 239 | 240 |
| Blastopirellula marina DSM 3645 | 241 | 242 |
| Planctomyces maris DSM 8797 | 243 | 244 |
| Algoriphagus sp. PR1 | 245 | 246 |
| Candidatus Sulcia muelleri str. Hc | 247 | 248 |
| (Homalodisca coagulata) | | |
| CandidatusCarsonella ruddii PV | 249 | 250 |
| Synechococcus sp. RS9916 | 251 | 252 |
| Synechococcus sp. WH 7803 | 253 | 254 |
| Synechococcus sp. CC9311 | 255 | 256 |
| Synechococcus sp. CC9605 | 257 | 258 |
| Synechococcus sp. WH 8102 | 259 | 260 |
| Synechococcus sp. BL107 | 261 | 262 |
| Synechococcus sp. RCC307 | 263 | 264 |
| Synechococcus sp. RS9917 | 265 | 266 |
| Synechococcus sp. WH 5701 | 267 | 268 |
| Prochlorococcus marinus str. MIT 9313 | 269 | 270 |
| Prochlorococcus marinus str. NATL2A | 271 | 272 |
| Prochlorococcus marinus str. MIT 9215 | 273 | 274 |
| Prochlorococcus marinus str. AS9601 | 275 | 276 |
| Prochlorococcus marinus str. MIT 9515 | 277 | 278 |
| Prochlorococcus marinus subsp. pastoris | 279 | 280 |
| str. CCMP1986 | | |
| Prochlorococcus marinus str. MIT 9211 | 281 | 282 |
| Prochlorococcus marinus subsp. marinus | 283 | 284 |
| str. CCMP1375 | | |
| Nodularia spumigena CCY9414 | 285 | 286 |
| Nostoc punctiforme PCC 73102 | 287 | 288 |
| Nostoc sp. PCC 7120 | 289 | 290 |
| Trichodesmium erythraeum IMS101 | 291 | 292 |
| Acaryochloris marina MBIC11017 | 293 | 294 |
| Lyngbya sp. PCC 8106 | 295 | 296 |
| Synechocystis sp. PCC 6803 | 297 | 298 |
| Cyanothece sp. CCY0110 | 299 | 300 |
| Thermosynechococcus elongatus BP-1 | 301 | 302 |
| Synechococcus sp. JA-2-3B′a(2-13) | 303 | 304 |
| Gloeobacter violaceus PCC 7421 | 305 | 306 |
| Nitrosomonas eutropha C91 | 307 | 308 |
| Nitrosomonas europaea ATCC 19718 | 309 | 310 |
| Nitrosospira multiformis ATCC 25196 | 311 | 312 |
| Chloroflexus aggregans DSM 9485 | 313 | 314 |
| Leptospirillum sp. Group II UBA | 315 | 316 |
| Leptospirillum sp. Group II UBA | 317 | 318 |
| Halorhodospira halophila SL1 | 319 | 320 |
| Nitrococcus mobilis Nb-231 | 321 | 322 |
| Alkalilimnicola ehrlichei MLHE-1 | 323 | 324 |
| Deinococcus geothermalis DSM 11300 | 325 | 326 |
| Polynucleobacter sp. QLW-P1DMWA-1 | 327 | 328 |
| Polynucleobacter necessarius STIR1 | 329 | 330 |
| Azoarcus sp. EbN1 | 331 | 332 |
| Burkholderia phymatum STM815 | 333 | 334 |
| Burkholderia xenovorans LB400 | 335 | 336 |
| Burkholderia multivorans ATCC 17616 | 337 | 338 |
| Burkholderia cenocepacia PC184 | 339 | 340 |
| Burkholderia mallei GB8 horse 4 | 341 | 342 |
| Ralstonia eutropha JMP134 | 343 | 344 |
| Ralstonia metallidurans CH34 | 345 | 346 |
| Ralstonia solanacearum UW551 | 347 | 348 |
| Ralstonia pickettii 12J | 349 | 350 |
| Limnobacter sp. MED105 | 351 | 352 |
| Herminiimonas arsenicoxydans | 353 | 354 |
| Bordetella parapertussis | 355 | 356 |
| Bordetella petrii DSM 12804 | 357 | 358 |
| Polaromonas sp. JS666 | 359 | 360 |
| Polaromonas naphthalenivorans CJ2 | 361 | 362 |
| Rhodoferax ferrireducens T118 | 363 | 364 |
| Verminephrobacter eiseniae EF01-2 | 365 | 366 |
| Acidovorax sp. JS42 | 367 | 368 |
| Delftia acidovorans SPH-1 | 369 | 370 |
| Methylibium petroleiphilum PM1 | 371 | 372 |
| gamma proteobacterium KT 71 | 373 | 374 |
| Tremblaya princeps | 375 | 376 |
| Blastopirellula marina DSM 3645 | 377 | 378 |
| Planctomyces maris DSM 8797 | 379 | 380 |
| Microcystis aeruginosa PCC 7806 | 381 | 382 |
| Salinibacter ruber DSM 13855 | 383 | 384 |
| Methylobacterium chloromethanicum | 385 | 386 |

TABLE 2
SEQ ID NOs of representative fungal and plant [2Fe—2S] 2 +
DHAD proteins and encoding sequences

| | SEQ ID NO: | SEQ ID NO: |
|---|---|---|
| Description | Nucleic acid | Peptide |
| Schizosaccharomyces pombe ILV3 | 387 | 388 |
| Saccharomyces cerevisiae ILV3 | 389 | 390 |
| Kluyveromyces lactis ILV3 | 391 | 392 |
| Candida albicans SC5314 ILV3 | 393 | 394 |
| Pichia stipitis CBS 6054 ILV3 | 395 | 396 |
| Yarrowia lipolytica ILV3 | 397 | 398 |
| Candida galbrata CBS 138 ILV3 | 399 | 400 |
| Chlamydomonas reinhardtii | 401 | 402 |
| Ostreococcus lucimarinus CCE9901 | 403 | 404 |
| Vitis vinifera | 405 | 406 |
| (Unnamed protein product: CAO71581.1) | | |
| Vitis vinifera | 407 | 408 |
| (Hypothetical protein: CAN67446.1) | | |
| Arabidopsis thaliana | 409 | 410 |
| Oryza sativa (indica cultivar-group) | 411 | 412 |
| Physcomitrella patens subsp. patens | 413 | 414 |
| Chaetomium globosum CBS 148.51 | 415 | 416 |
| Neurospora crassa OR74A | 417 | 418 |
| Magnaporthe grisea 70-15 | 419 | 420 |
| Gibberella zeae PH-1 | 421 | 422 |
| Aspergillus niger | 423 | 424 |
| Neosartorya fischeri NRRL 181 | 425 | 426 |
| (XP_001266525.1) | | |
| Neosartorya fischeri NRRL 181 | 427 | 428 |
| (XP_001262996.1) | | |
| Aspergillus niger | 429 | 430 |
| (hypothetical protein An03g04520) | | |
| Aspergillus niger | 431 | 432 |
| (Hypothetical protein An14g03280) | | |
| Aspergillus terreus NIH2624 | 433 | 434 |
| Aspergillus clavatus NRRL 1 | 435 | 436 |
| Aspergillus nidulans FGSC A4 | 437 | 438 |
| Aspergillus oryzae | 439 | 440 |
| Ajellomyces capsulatus NAm1 | 441 | 442 |
| Coccidioides immitis RS | 443 | 444 |
| Botryotinia fuckeliana B05.10 | 445 | 446 |
| Phaeosphaeria nodorum SN15 | 447 | 448 |
| Pichia guilliermondii ATCC 6260 | 449 | 450 |
| Debaryomyces hansenii CBS767 | 451 | 452 |
| Lodderomyces elongisporus NRRL YB-4239 | 453 | 454 |
| Vanderwaltozyma polyspora DSM 70294 | 455 | 456 |
| Ashbya gossypii ATCC 10895 | 457 | 458 |
| Laccaria bicolor S238N-H82 | 459 | 460 |
| Coprinopsis cinerea okayama7#130 | 461 | 462 |
| Cryptococcus neoformans var. | 463 | 464 |
| neoformans JEC21 | | |
| Ustilago maydis 521 | 465 | 466 |
| Malassezia globosa CBS 7966 | 467 | 468 |
| Aspergillus clavatus NRRL 1 | 469 | 470 |
| Neosartorya fischeri NRRL 181 (Putative) | 471 | 472 |
| Aspergillus oryzae | 473 | 474 |
| Aspergillus niger (hypothetical | 475 | 476 |
| protein An18g04160) | | |
| Aspergillus terreus NIH2624 | 477 | 478 |
| Coccidioides immitis RS (hypothetical | 479 | 480 |
| protein CIMG_04591) | | |
| Paracoccidioides brasiliensis | 481 | 482 |
| Phaeosphaeria nodorum SN15 | 483 | 484 |
| Gibberella zeae PH-1 | 485 | 486 |
| Neurospora crassa OR74A | 487 | 488 |
| Coprinopsis cinerea okayama 7#130 | 489 | 490 |
| Laccaria bicolor S238N-H82 | 491 | 492 |
| Ustilago maydis 521 | 493 | 494 |

TABLE 3
SEQ ID NOs of representative [4Fe—4S] 2 +
DHAD proteins and encoding sequences

| | SEQ ID NO: | SEQ ID NO: |
|---|---|---|
| Organism | Nucleic acid | Peptide |
| Escherichia coli str. K-12 substr. MG1655 | 495 | 496 |
| Bacillus subtilis subsp. subtilis str. 168 | 497 | 498 |
| Agrobacterium tumefaciens str. C58 | 499 | 500 |
| Burkholderia cenocepacia MC0-3 | 501 | 502 |
| Psychrobacter cryohalolentis K5 | 503 | 504 |
| Psychromonas sp. CNPT3 | 505 | 506 |
| Deinococcus radiodurans R1 | 507 | 508 |
| Wolinella succinogenes DSM 1740 | 509 | 510 |
| Zymomonas mobilis subsp. mobilis ZM4 | 511 | 512 |
| Clostridium acetobutylicum ATCC 824 | 513 | 514 |
| Clostridium beijerinckii NCIMB 8052 | 515 | 516 |
| Pseudomonas fluorescens Pf-5 | 517 | 518 |
| Methanococcus maripaludis C7 | 519 | 520 |
| Methanococcus aeolicus Nankai-3 | 521 | 522 |
| Vibrio fischeri ATCC 700601 (ES114) | 523 | 524 |
| Shewanella oneidensis MR-1 ATCC 700550 | 525 | 526 |

TABLE 4
SEQ ID NOs of representative Suf operon Fe—S cluster
forming proteins and encoding sequences.

| | SEQ ID NO: | SEQ ID NO: |
|---|---|---|
| Organism and gene name | nucleic acid | amino acid |
| Lactoabcillus plantarum sufC | 595 | 596 |
| Lactococcus lactis sufC | 597 | 598 |
| Escherichia coli sufC | 599 | 600 |
| Lactoabcillus plantarum sufD | 601 | 602 |
| Lactococcus lactis sufD | 603 | 604 |
| Escherichia coli sufD | 605 | 606 |
| Lactoabcillus plantarum sufB | 607 | 608 |
| Lactococcus lactis sufB | 609 | 610 |
| Escherichia coli sufB | 611 | 612 |
| Escherichia coli sufA | 613 | 614 |
| Escherichia coli sufE | 615 | 616 |
| Lactococcus lactis yseH | 617 | 618 |
| Lactoabcillus plantarum sufU | 619 | 620 |
| Lactococcus lactis sufU | 621 | 622 |
| Lactoabcillus plantarum, sufS | 623 | 624 |
| Lactobacillus reuteri, sufS | 625 | 626 |
| Lactobacillus fermentum, sufS | 627 | 628 |
| Enterococcus faecalis, sufS | 629 | 630 |
| Lactobacillus faecium DO, sufS | 631 | 632 |
| Lactobacillus sakei subsp. sakei 23K, | 633 | 634 |
| putative sufS | | |
| Carnobacterium sp. AT7, sufS | 635 | 636 |
| Streptococcus mutans UA159, sufS | 637 | 638 |
| Streptococcus suis 05ZYH33, sufS | 639 | 640 |
| Streptococcus sanguinis SK36 , sufS | 641 | 642 |
| Leuconostoc mesenteroides subsp. | 643 | 644 |
| mesenteroides ATCC 8293, sufS | | |
| Streptococcus thermophilus LMG 18311, | 645 | 646 |
| sufS | | |
| Lactococcus lactis subsp. cremoris SK11, | 647 | 648 |
| sufS hypothetical protein LACR_1972 | | |
| Bacillus sp. B14905, sufS | 649 | 650 |
| 00018 Streptococcus infantarius subsp. | 651 | 652 |
| infantarius ATCC BAA-102, sufS | | |
| hypothetical protein STRINF | | |
| Lactobacillus helveticus CNRZ32, sufS | 653 | 654 |
| Streptococcus pneumoniae CGSP14, sufS | 655 | 656 |
| Geobacillus sp. WCH70, sufS | 657 | 658 |
| Leuconostoc citreum KM20, sufS | 659 | 660 |
| Listeria monocytogenes EGD-e, sufS | 661 | 662 |
| hypothetical protein Imo2413 | | |
| Lactobacillus Johnsonii NCC 533, sufS | 663 | 664 |
| Bacillus sp. SG-1, sufS | 665 | 666 |
| Bacillus clausii KSM-K16, sufS | 667 | 668 |
| Bacillus pumilus SAFR-032, sufS | 669 | 670 |
| Geobacillus kaustophilus HTA426, sufS | 671 | 672 |
| Bacillus selenitireducens MLS10, sufS | 673 | 674 |
| Streptococcus pyogenes MGAS10750, sufS | 675 | 676 |
| Bacillus sp. NRRL B-14911, sufS | 677 | 678 |
| Paenibacillus larvae subsp. larvae BRL- | 679 | 680 |
| 230010, sufS | | |
| Bacillus subtilis subsp. subtilis str. | 681 | 682 |
| 168, sufS | | |
| Bacillus licheniformis ATCC 14580, sufS | 683 | 684 |
| Oceanobacillus iheyensis HTE831, sufS | 685 | 686 |
| Bacillus coagulans 36D1, sufS | 687 | 688 |
| Staphylococcus aureus subsp. aureus Mu50, | 689 | 690 |
| sufS | | |
| Staphylococcus saprophyticus subsp. | 691 | 692 |
| saprophyticus ATCC 15305, putative sufS | | |
| Paenibacillus sp. JDR-2, sufS | 693 | 694 |
| Lactobacillus salivarius UCC118, sufS | 695 | 696 |
| Exiguobacterium sibiricum 255-15, sufS | 697 | 698 |
| Exiguobacterium sp. AT1b, sufS | 699 | 700 |
| Rubrobacter xylanophilus DSM 9941, sufS | 701 | 702 |
| Clostridium acetobutylicum ATCC 824, | 703 | 704 |
| sufS | | |
| Clostridium beijerinckii NCIMB 8052, | 705 | 706 |
| sufS | | |
| Clostridium kluyveri DSM 555, sufS | 707 | 708 |
| Lactobacillus casei ATCC 334, sufS | 709 | 710 |
| Thermoanaerobacter pseudethanolicus | 711 | 712 |
| ATCC 33223, sufS | | |
| Symbiobacterium thermophilum IAM 14863, | 713 | 714 |
| sufS | | |
| Thermoanaerobacter tengcongensis MB4, | 715 | 716 |
| sufS | | |
| Verrucomicrobium spinosum DSM 4136, | 717 | 718 |
| sufS | | |
| Oenococcus oeni PSU-1, sufS | 719 | 720 |
| Mariprofundus ferrooxydans PV-1, sufS | 721 | 722 |
| Opitutus terrae PB90-1, sufS | 723 | 724 |
| Nitrosococcus oceani ATCC 19707, sufS | 725 | 726 |
| Lactobacillus delbrueckii subsp. | 727 | 728 |
| bulgaricus ATCC 11842, sufS | | |
| Escherichia coli str. K-12 substr. | 729 | 730 |
| MG1655, sufS (PLP-dependent) | | |
| Rhodoferax ferrireducens T118, sufS | 731 | 732 |
| Thermus thermophilus HB27, sufS | 733 | 734 |
| Streptomyces avermitilis MA-4680, sufS | 735 | 736 |
| Clostridium sp. L2-50, sufS protein | 737 | 738 |
| CLOL250_02464 | | |
| Coprococcus eutactus ATCC 27759, sufS | 739 | 740 |
| hypothetical protein COPEUT_00639 | | |
| Thermobifida fusca YX, sufS | 741 | 742 |
| Acidothermus cellulolyticus 11B, sufS | 743 | 744 |
| Methylococcus capsulatus str. Bath, | 745 | 746 |
| sufS | | |
| Thauera sp. MZ1T, sufS | 747 | 748 |
| Streptomyces coelicolor A3(2), sufS | 749 | 750 |
| Solibacter usitatus Ellin6076, sufS | 751 | 752 |
| Coxiella burnetii RSA 493, sufS | 753 | 754 |
| Petrotoga mobilis SJ95, sufS | 755 | 756 |
| Synechocystis sp. PCC 6803, sufS | 757 | 758 |
| Ralstonia eutropha H16, sufS | 759 | 760 |
| Thermotoga maritima MSB8 sufS | 761 | 762 |
| Gloeobacter violaceus PCC 7421, sufS | 763 | 764 |
| Nitrococcus mobilis Nb-231, sufS | 765 | 766 |
| Pediococcus pentosaceus ATCC 25745, | 767 | 768 |
| sufS | | |
| Streptomyces griseus subsp. griseus | 769 | 770 |
| NBRC 13350, sufS | | |
| Nitrosospira multiformis ATCC 25196, | 771 | 772 |
| sufS | | |
| Frankia sp. EAN1pec, sufS | 773 | 774 |
| Propionibacterium acnes KPA171202, | 775 | 776 |
| putative sufS | | |
| Rhodococcus sp. RHA1, sufS | 777 | 778 |
| Alkalilimnicola ehrlichei MLHE-1, | 779 | 780 |
| sufS | | |
| Anaeromyxobacter sp. Fw109-5, sufS | 781 | 782 |
| Anaeromyxobacter sp. K, sufS | 783 | 784 |
| Mycobacterium abscessus, sufS | 785 | 786 |
| Lentisphaera araneosa HTCC2155, sufS | 787 | 788 |
| Saccharopolyspora erythraea NRRL 2338, | 789 | 790 |
| sufS | | |
| Acidiphilium cryptum JF-5, sufS | 791 | 792 |
| Nocardia farcinica IFM 10152, sufS | 793 | 794 |
| Nocardioides sp. JS614, sufS | 795 | 796 |
| Corynebacterium urealyticum DSM 7109, | 797 | 798 |
| sufS | | |
| Legionella pneumophila subsp. | 799 | 800 |
| pneumophila str. Philadelphia 1, sufS | | |
| Mycobacterium marinum M, sufS | 801 | 802 |
| Psychromonas ingrahamii 37, sufS | 803 | 804 |
| Corynebacterium efficiens YS-314, sufS | 805 | 806 |
| Corynebacterium jeikeium K411, | 807 | 808 |
| putative sufS | | |
| Leptospira borgpetersenii serovar | 809 | 810 |
| Hardjobovis L550, sufS | | |
| Mycobacterium vanbaalenii PYR-1, sufS | 811 | 812 |
| Mycobacterium gilvum PYR-GCK, sufS | 813 | 814 |
| Mycobacterium tuberculosis H37Rv, sufS | 815 | 816 |
| Janibacter sp. HTCC2649, sufS | 817 | 818 |
| Salinispora arenicola CNS-205, sufS | 819 | 820 |
| Polaromonas sp. JS666, sufS | 821 | 822 |
| Nitrosomonas eutropha C91, sufS | 823 | 824 |
| Mycobacterium sp. MCS, sufS | 825 | 826 |
| Frankia alni ACN14a, sufS | 827 | 828 |
| Salinispora tropica CNB-440, sufS | 829 | 830 |
| Nitrosomonas europaea ATCC 19718, sufS | 831 | 832 |
| Leptospira interrogans serovar | 833 | 834 |
| Copenhageni str. Fiocruz L1-130, sufS | | |
| Mycobacterium avium subsp. | 835 | 836 |
| paratuberculosis K-10, sufS | | |
| hypothetical protein MAP1190 | | |
| Thermotoga maritima MSB8, sufS | 837 | 838 |
| Pectobacterium atrosepticum SCRI1043, | 839 | 840 |
| sufS | | |
| Corynebacterium glutamicum ATCC 13032, | 841 | 842 |
| sufS | | |
| Clavibacter michiganensis subsp. | 843 | 844 |
| michiganensis NCPPB 382, putative sufS | | |
| Frankia sp. Ccl3, sufS | 845 | 846 |
| Gluconacetobacter diazotrophicus PAI 5, | 847 | 848 |
| putative sufS | | |
| Candidatus Pelagibacter ubique | 849 | 850 |
| HTCC1062, sufS | | |
| Kineococcus radiotolerans SRS30216, | 851 | 852 |
| sufS | | |
| Finegoldia magna ATCC 29328, sufS | 853 | 854 |
| Collinsella aerofaciens ATCC 25986, | 855 | 856 |
| sufS hypothetical protein COLAER_01633 | | |
| Peptostreptococcus micros ATCC 33270, | 857 | 858 |
| hypothetical protein PEPMIC_00951 | | |
| Arthrobacter chlorophenolicus A6, sufS | 859 | 860 |
| Granulibacter bethesdensis CGDNIH1, | 861 | 862 |
| sufS | | |
| Arthrobacter sp. FB24, sufS | 863 | 864 |
| Thermosipho melanesiensis BI429, sufS | 865 | 866 |
| Renibacterium salmoninarum ATCC 33209, | 867 | 868 |
| sufS | | |
| Leifsonia xyli subsp. xyli str. CTCB07, | 869 | 870 |
| sufS | | |
| Acholeplasma laidlawii PG-8A, sufS | 871 | 872 |
| Brevibacterium linens BL2, sufS | 873 | 874 |
| Corynebacterium diphtheriae NCTC 13129, | 875 | 876 |
| sufS | | |
| Bifidobacterium animalis subsp. lactis | 877 | 878 |
| HN019, sufS | | |
| Burkholderia thailandensis MSMB43, | 879 | 880 |
| sufS | | |

Annotations in public databases may have a different protein indicated for some of the SufS proteins above. Annotation as Class V aminotransferase refers to the same protein as cysteine desulfurase.

TABLE 5
SEQ ID NOs of representative Isc and Nif operon Fe—S cluster
forming proteins and encoding sequences

| | SEQ ID NO: | SEQ ID NO: |
|---|---|---|
| Organism and gene name | nucleic acid | amino acid |
| Escherichia coli iscS | 527 | 528 |
| Escherichia coli iscU | 529 | 530 |
| Escherichia coli iscA | 531 | 532 |
| Escherichia coli hscB | 533 | 534 |
| Escherichia coli hscA | 535 | 536 |
| Escherichia coli fdx | 537 | 538 |
| Escherichia coli iscX | 539 | 540 |
| Wolinella succinogenes nifS | 541 | 542 |
| Wolinella succinogenes nifU | 543 | 544 |

TABLE 6
SEQ ID NOs of additional proteins and encoding sequences

| | SEQ ID NO: | SEQ ID NO: |
|---|---|---|
| Description | Encoding seq | protein |
| Vibrio cholerae KARI | 545 | 546 |
| Pseudomonas aeruginosa PAO1 KARI | 551 | 552 |
| Pseudomonas fluorescens PF5 KARI | 547 | 548 |
| Achromobacter xylosoxidans | 549 | 550 |
| butanol dehydrogenase sadB | | |

[0021] SEQ ID NOs:554-570, 572, 573, 575, 576, 578-588, 592 and 593 are nucleotide sequences of primers used in the Examples.

[0022] SEQ ID NOs:553, 571, 574, 577 and 594 are nucleotide sequences of vectors used in the Examples.

[0023] SEQ ID NO:589 is the nucleotide sequence of the Suf operon from Lactobacillus plantarum PN0512.

[0024] SEQ ID NO:590 is the nucleotide sequence of a ribosome binding sequence used in the Examples.

[0025] SEQ ID NO:591 is the nucleotide sequence of the promoter region of the IdhL1 gene from Lactobacillus plantarum PN0512.

[0026] SEQ ID NO:881 is the nucleotide sequence of the Suf operon from Lactococcus lactis subsp lactis NCDO2118.

### DETAILED DESCRIPTION OF THE INVENTION

[0027] The present invention solves the stated problem by providing recombinant lactic acid bacterial cells that express DHAD and that express at least one recombinant genetic element encoding Fe—S cluster forming proteins. These cells have increased DHAD activity as compared to DHAD activity in cells without the recombinant genetic element. In these cells, products synthesized by a pathway that includes DHAD activity may be increased, including amino acids valine, leucine and isoleucine, vitamin B5, and isobutanol. The amino acids and vitamin B5 may be used as nutritional supplements, and isobutanol may be used as a fuel additive to reduce demand for petrochemicals.

[0028] The following abbreviations and definitions will be used for the interpretation of the specification and the claims.

[0029] As used herein, the terms “comprises,” “comprising,” “includes,” “including,” “has,” “having,” “contains” or “containing,” or any other variation thereof, are intended to cover a non-exclusive inclusion. For example, a composition, a mixture, process, method, article, or apparatus that comprises a list of elements is not necessarily limited to only those elements but may include other elements not expressly listed or inherent to such composition, mixture, process, method, article, or apparatus. Further, unless expressly stated to the contrary, “or” refers to an inclusive or and not to an exclusive or. For example, a condition A or B is satisfied by any one of the following: A is true (or present) and B is false (or not present), A is false (or not present) and B is true (or present), and both A and B are true (or present).

[0030] Also, the indefinite articles “a” and “an” preceding an element or component of the invention are intended to be nonrestrictive regarding the number of instances (i.e. occurrences) of the element or component. Therefore “a” or “an” should be read to include one or at least one, and the singular word form of the element or component also includes the plural unless the number is obviously meant to be singular.

[0031] The term “invention” or “present invention” as used herein is a non-limiting term and is not intended to refer to any single embodiment of the particular invention but encompasses all possible embodiments as described in the specification and the claims.

[0032] As used herein, the term “about” modifying the quantity of an ingredient or reactant of the invention employed refers to variation in the numerical quantity that can occur, for example, through typical measuring and liquid handling procedures used for making concentrates or use solutions in the real world; through inadvertent error in these procedures; through differences in the manufacture, source, or purity of the ingredients employed to make the compositions or carry out the methods; and the like. The term “about” also encompasses amounts that differ due to different equilibrium conditions for a composition resulting from a particular initial mixture. Whether or not modified by the term “about”, the claims include equivalents to the quantities. In one embodiment, the term “about” means within 10% of the reported numerical value, preferably within 5% of the reported numerical value

[0033] The term “isobutanol biosynthetic pathway” refers to an enzyme pathway to produce isobutanol from pyruvate.

[0034] The term “a facultative anaerobe” refers to a microorganism that can grow in both aerobic and anaerobic environments.

[0035] The term “carbon substrate” or “fermentable carbon substrate” refers to a carbon source capable of being metabolized by host organisms of the present invention and particularly carbon sources selected from the group consisting of monosaccharides, oligosaccharides, polysaccharides, and one-carbon substrates or mixtures thereof.

[0036] The term “gene” refers to a nucleic acid fragment that is capable of being expressed as a specific protein, optionally including regulatory sequences preceding (5′ non-coding sequences) and following (3′ non-coding sequences) the coding sequence. “Native gene” refers to a gene as found in nature with its own regulatory sequences. “Chimeric gene” refers to any gene that is not a native gene, comprising regulatory and coding sequences that are not found together in nature. Accordingly, a chimeric gene may comprise regulatory sequences and coding sequences that are derived from different sources, or regulatory sequences and coding sequences derived from the same source, but arranged in a manner different than that found in nature. “Endogenous gene” refers to a native gene in its natural location in the genome of an organism. A “foreign gene” or “heterologous gene” refers to a gene not normally found in the host organism, but that is introduced into the host organism by gene transfer. “Heterologous gene” includes a native coding region, or portion thereof, that is reintroduced into the source organism in a form that is different from the corresponding native gene. For example, a heterologous gene may include a native coding region that is a portion of a chimeric gene including non-native regulatory regions that is reintroduced into the native host. Foreign genes can comprise native genes inserted into a non-native organism, or chimeric genes. A “transgene” is a gene that has been introduced into the genome by a transformation procedure.

[0037] The term “recombinant genetic expression element” refers to a nucleic acid fragment that expresses one or more specific proteins, including regulatory sequences preceding (5′ non-coding sequences) and following (3′ termination sequences) coding sequences for the proteins. A chimeric gene is a recombinant genetic expression element. The coding regions of an operon may form a recombinant genetic expression element, along with an operably linked promoter and termination region.

[0038] As used herein the term “coding region” refers to a DNA sequence that codes for a specific amino acid sequence. “Suitable regulatory sequences” refer to nucleotide sequences located upstream (5′ non-coding sequences), within, or downstream (3′ non-coding sequences) of a coding sequence, and which influence the transcription, RNA processing or stability, or translation of the associated coding sequence. Regulatory sequences may include promoters, translation leader sequences, introns, polyadenylation recognition sequences, RNA processing site, effector binding site and stem-loop structure.

[0039] The term “promoter” refers to a DNA sequence capable of controlling the expression of a coding sequence or functional RNA. In general, a coding sequence is located 3′ to a promoter sequence. Promoters may be derived in their entirety from a native gene, or be composed of different elements derived from different promoters found in nature, or even comprise synthetic DNA segments. It is understood by those skilled in the art that different promoters may direct the expression of a gene in different tissues or cell types, or at different stages of development, or in response to different environmental or physiological conditions. Promoters which cause a gene to be expressed in most cell types at most times are commonly referred to as “constitutive promoters”. It is further recognized that since in most cases the exact boundaries of regulatory sequences have not been completely defined, DNA fragments of different lengths may have identical promoter activity.

[0040] The term “operably linked” refers to the association of nucleic acid sequences on a single nucleic acid fragment so that the function of one is affected by the other. For example, a promoter is operably linked with a coding sequence when it is capable of effecting the expression of that coding sequence (i.e., that the coding sequence is under the transcriptional control of the promoter). Coding sequences can be operably linked to regulatory sequences in sense or antisense orientation.

[0041] The term “expression”, as used herein, refers to the transcription and stable accumulation of sense (mRNA) or antisense RNA derived from the nucleic acid fragment of the invention. Expression may also refer to translation of mRNA into a polypeptide.

[0042] The term “overexpression” , as used herein, refers to expression that is higher than endogenous expression of the same or related gene. A heterologous gene is overexpressed if its expression is higher than that of a comparable endogenous gene.

[0043] As used herein the term “transformation” refers to the transfer of a nucleic acid fragment into a host organism, resulting in genetically stable inheritance. Host organisms containing the transformed nucleic acid fragments are referred to as “transgenic” or “recombinant” or “transformed” organisms.

[0044] The terms “plasmid” and “vector” as used herein, refer to an extra chromosomal element often carrying genes which are not part of the central metabolism of the cell, and usually in the form of circular double-stranded DNA molecules. Such elements may be autonomously replicating sequences, genome integrating sequences, phage or nucleotide sequences, linear or circular, of a single- or double-stranded DNA or RNA, derived from any source, in which a number of nucleotide sequences have been joined or recombined into a unique construction which is capable of introducing a promoter fragment and DNA sequence for a selected gene product along with appropriate 3′ untranslated sequence into a cell.

[0045] As used herein the term “codon degeneracy” refers to the nature in the genetic code permitting variation of the nucleotide sequence without effecting the amino acid sequence of an encoded polypeptide. The skilled artisan is well aware of the “codon-bias” exhibited by a specific host cell in usage of nucleotide codons to specify a given amino acid. Therefore, when synthesizing a gene for improved expression in a host cell, it is desirable to design the gene such that its frequency of codon usage approaches the frequency of preferred codon usage of the host cell.

[0046] The term “codon-optimized” as it refers to genes or coding regions of nucleic acid molecules for transformation of various hosts, refers to the alteration of codons in the gene or coding regions of the nucleic acid molecules to reflect the typical codon usage of the host organism without altering the polypeptide encoded by the DNA.

[0047] As used herein, an “isolated nucleic acid fragment” or “isolated nucleic acid molecule” will be used interchangeably and will mean a polymer of RNA or DNA that is single- or double-stranded, optionally containing synthetic, non-natural or altered nucleotide bases. An isolated nucleic acid fragment in the form of a polymer of DNA may be comprised of one or more segments of cDNA, genomic DNA or synthetic DNA.

[0048] A nucleic acid fragment is “hybridizable” to another nucleic acid fragment, such as a cDNA, genomic DNA, or RNA molecule, when a single-stranded form of the nucleic acid fragment can anneal to the other nucleic acid fragment under the appropriate conditions of temperature and solution ionic strength. Hybridization and washing conditions are well known and exemplified in Sambrook, J., Fritsch, E. F. and Maniatis, T. Molecular Cloning: A Laboratory Manual, 2^{nd} ed., Cold Spring Harbor Laboratory: Cold Spring Harbor, N.Y. (1989), particularly Chapter 11 and Table 11.1 therein (entirely incorporated herein by reference). The conditions of temperature and ionic strength determine the “stringency” of the hybridization. Stringency conditions can be adjusted to screen for moderately similar fragments (such as homologous sequences from distantly related organisms), to highly similar fragments (such as genes that duplicate functional enzymes from closely related organisms).

[0049] Post-hybridization washes determine stringency conditions. One set of preferred conditions uses a series of washes starting with 6×SSC, 0.5% SDS at room temperature for 15 min, then repeated with 2×SSC, 0.5% SDS at 45° C. for 30 min, and then repeated twice with 0.2×SSC, 0.5% SDS at 50° C. for 30 min. A more preferred set of stringent conditions uses higher temperatures in which the washes are identical to those above except for the temperature of the final two 30 min washes in 0.2×SSC, 0.5% SDS was increased to 60° C. Another preferred set of highly stringent conditions uses two final washes in 0.1×SSC, 0.1% SDS at 65° C. An additional set of stringent conditions include hybridization at 0.1×SSC, 0.1% SDS, 65° C. and washes with 2×SSC, 0.1% SDS followed by 0.1×SSC, 0.1% SDS, for example.

[0050] Hybridization requires that the two nucleic acids contain complementary sequences, although depending on the stringency of the hybridization, mismatches between bases are possible. The appropriate stringency for hybridizing nucleic acids depends on the length of the nucleic acids and the degree of complementation, variables well known in the art. The greater the degree of similarity or homology between two nucleotide sequences, the greater the value of Tm for hybrids of nucleic acids having those sequences. The relative stability (corresponding to higher Tm) of nucleic acid hybridizations decreases in the following order: RNA:RNA, DNA:RNA, DNA:DNA. For hybrids of greater than 100 nucleotides in length, equations for calculating Tm have been derived (see Sambrook et al., supra, 9.50-9.51). For hybridizations with shorter nucleic acids, i.e., oligonucleotides, the position of mismatches becomes more important, and the length of the oligonucleotide determines its specificity (see Sambrook et al., supra, 11.7-11.8). In one embodiment the length for a hybridizable nucleic acid is at least about 10 nucleotides. Preferably a minimum length for a hybridizable nucleic acid is at least about 15 nucleotides; more preferably at least about 20 nucleotides; and most preferably the length is at least about 30 nucleotides. Furthermore, the skilled artisan will recognize that the temperature and wash solution salt concentration may be adjusted as necessary according to factors such as length of the probe.

[0051] A “substantial portion” of an amino acid or nucleotide sequence is that portion comprising enough of the amino acid sequence of a polypeptide or the nucleotide sequence of a gene to putatively identify that polypeptide or gene, either by manual evaluation of the sequence by one skilled in the art, or by computer-automated sequence comparison and identification using algorithms such as BLAST (Altschul, S. F., et al., J. Mol. Biol., 215:403-410 (1993)). In general, a sequence of ten or more contiguous amino acids or thirty or more nucleotides is necessary in order to putatively identify a polypeptide or nucleic acid sequence as homologous to a known protein or gene. Moreover, with respect to nucleotide sequences, gene specific oligonucleotide probes comprising 20-30 contiguous nucleotides may be used in sequence-dependent methods of gene identification (e.g., Southern hybridization) and isolation (e.g., in situ hybridization of bacterial colonies or bacteriophage plaques). In addition, short oligonucleotides of 12-15 bases may be used as amplification primers in PCR in order to obtain a particular nucleic acid fragment comprising the primers. Accordingly, a “substantial portion” of a nucleotide sequence comprises enough of the sequence to specifically identify and/or isolate a nucleic acid fragment comprising the sequence. The instant specification teaches the complete amino acid and nucleotide sequence encoding particular proteins. The skilled artisan, having the benefit of the sequences as reported herein, may now use all or a substantial portion of the disclosed sequences for purposes known to those skilled in this art. Accordingly, the instant invention comprises the complete sequences as reported in the accompanying Sequence Listing, as well as substantial portions of those sequences as defined above.

[0052] The term “complementary” is used to describe the relationship between nucleotide bases that are capable of hybridizing to one another. For example, with respect to DNA, adenosine is complementary to thymine and cytosine is complementary to guanine.

[0053] The term “percent identity”, as known in the art, is a relationship between two or more polypeptide sequences or two or more polynucleotide sequences, as determined by comparing the sequences. In the art, “identity” also means the degree of sequence relatedness between polypeptide or polynucleotide sequences, as the case may be, as determined by the match between strings of such sequences. “Identity” and “similarity” can be readily calculated by known methods, including but not limited to those described in: 1.) Computational Molecular Biology (Lesk, A. M., Ed.) Oxford University: NY (1988); 2.) Biocomputing: Informatics and Genome Projects (Smith, D. W., Ed.) Academic: NY (1993); 3.) Computer Analysis of Sequence Data, Part I (Griffin, A. M., and Griffin, H. G., Eds.) Humania: NJ (1994); 4.) Sequence Analysis in Molecular Biology (von Heinje, G., Ed.) Academic (1987); and 5.) Sequence Analysis Primer (Gribskov, M. and Devereux, J., Eds.) Stockton: NY (1991).

[0054] Preferred methods to determine identity are designed to give the best match between the sequences tested. Methods to determine identity and similarity are codified in publicly available computer programs. Sequence alignments and percent identity calculations may be performed using the MegAlign™ program of the LASERGENE bioinformatics computing suite (DNASTAR Inc., Madison, Wis.). Multiple alignment of the sequences is performed using the “Clustal method of alignment” which encompasses several varieties of the algorithm including the “Clustal V method of alignment” corresponding to the alignment method labeled Clustal V (described by Higgins and Sharp, CABIOS. 5:151-153 (1989); Higgins, D. G. et al., Comput. Appl. Biosci., 8:189-191 (1992)) and found in the MegAlign™ program of the LASERGENE bioinformatics computing suite (DNASTAR Inc.). For multiple alignments, the default values correspond to GAP PENALTY=10 and GAP LENGTH PENALTY=10. Default parameters for pairwise alignments and calculation of percent identity of protein sequences using the Clustal method are KTUPLE=1, GAP PENALTY=3, WINDOW=5 and DIAGONALS SAVED=5. For nucleic acids these parameters are KTUPLE=2, GAP PENALTY=5, WINDOW=4 and DIAGONALS SAVED=4. After alignment of the sequences using the Clustal V program, it is possible to obtain a “percent identity” by viewing the “sequence distances” table in the same program. Additionally the “Clustal W method of alignment” is available and corresponds to the alignment method labeled Clustal W (described by Higgins and Sharp, CABIOS. 5:151-153 (1989); Higgins, D. G. et al., Comput. Appl. Biosci. 8:189-191(1992)) and found in the MegAlign™ v6.1 program of the LASERGENE bioinformatics computing suite (DNASTAR Inc.). Default parameters for multiple alignment (GAP PENALTY=10, GAP LENGTH PENALTY=0.2, Delay Divergen Seqs(%)=30, DNA Transition Weight=0.5, Protein Weight Matrix=Gonnet Series, DNA Weight Matrix=IUB). After alignment of the sequences using the Clustal W program, it is possible to obtain a “percent identity” by viewing the “sequence distances” table in the same program.

[0055] It is well understood by one skilled in the art that many levels of sequence identity are useful in identifying polypeptides, from other species, wherein such polypeptides have the same or similar function or activity. Useful examples of percent identities include, but are not limited to: 55%, 60%, 65%, 70%, 75%, 80%, 85%, 90%, or 95%, or any integer percentage from 55% to 100% may be useful in describing the present invention, such as 55%, 56%, 57%, 58%, 59%, 60%, 61%, 62%, 63%, 64%, 65%, 66%, 67%, 68%, 69%, 70%, 71%, 72%, 73%, 74%, 75%, 76%, 77%, 78%, 79%, 80%, 81%, 82%, 83%, 84%, 85%, 86%, 87%, 88%, 89%, 90%, 91%, 92%, 93%, 94%, 95%, 96%, 97%, 98% or 99%. Suitable nucleic acid fragments not only have the above homologies but typically encode a polypeptide having at least 50 amino acids, preferably at least 100 amino acids, more preferably at least 150 amino acids, still more preferably at least 200 amino acids, and most preferably at least 250 amino acids.

[0056] The term “sequence analysis software” refers to any computer algorithm or software program that is useful for the analysis of nucleotide or amino acid sequences. “Sequence analysis software” may be commercially available or independently developed. Typical sequence analysis software will include, but is not limited to: 1.) the GCG suite of programs (Wisconsin Package Version 9.0, Genetics Computer Group (GCG), Madison, Wis.); 2.) BLASTP, BLASTN, BLASTX (Altschul et al., J. Mol. Biol., 215:403-410 (1990)); 3.) DNASTAR (DNASTAR, Inc. Madison, Wis.); 4.) Sequencher (Gene Codes Corporation, Ann Arbor, Mich.); and 5.) the FASTA program incorporating the Smith-Waterman algorithm (W. R. Pearson, Comput. Methods Genome Res., [Proc. Int. Symp.] (1994), Meeting Date 1992, 111-20. Editor(s): Suhai, Sandor. Plenum: New York, N.Y.). Within the context of this application it will be understood that where sequence analysis software is used for analysis, that the results of the analysis will be based on the “default values” of the program referenced, unless otherwise specified. As used herein “default values” will mean any set of values or parameters that originally load with the software when first initialized.

[0057] Standard recombinant DNA and molecular cloning techniques used here are well known in the art and are described by Sambrook, J., Fritsch, E. F. and Maniatis, T., Molecular Cloning: A Laboratory Manual, Second Edition, Cold Spring Harbor Laboratory Press, Cold Spring Harbor, N.Y. (1989) (hereinafter “Maniatis”); and by Silhavy, T. J., Bennan, M. L. and Enquist, L. W., Experiments with Gene Fusions, Cold Spring Harbor Laboratory Press, Cold Spring Harbor, N.Y. (1984); and by Ausubel, F. M. et al., Current Protocols in Molecular Biology, published by Greene Publishing Assoc. and Wiley-Interscience (1987).

[0058] The invention provides recombinant lactic acid bacterial cells expressing a functional dihydroxy-acid dehydratase polypeptide where the lactic acid bacterial cell is also expressing at least one recombinant genetic element encoding iron-sulfur cluster forming proteins. It has been discovered that the co-expression of a dihydroxy-acid dehydratase polypeptide with a recombinant genetic expression element encoding iron-sulfur cluster forming proteins results in increased specific activity of dihydroxy-acid dehydratase. Specific activity is based on concentration of total soluble protein in a crude cell extract.

### Lactic Acid Bacterial Cells

[0059] Lactic acid bacteria (LAB) which may be used as hosts in the present disclosure include, but are not limited to, Lactococcus, Lactobacillus, Leuconostoc, Oenococcus, Pediococcus, and Streptococcus. These and any LAB cells that are amenable to genetic manipulation may be modified as disclosed herein for increased DHAD activity.

### Expression of DHAD Activity

[0060] In the disclosed LAB cells, DHAD activity may be provided by natural expression of an endogenous DHAD protein, by expression of an introduced heterologous DHAD gene, or both. For example, cells of Lactococcus, Streptococcus, and Leuconostoc have endogenous genes encoding DHAD, and may have this endogenous activity enhanced by introduction of a heterologous DHAD encoding gene. DHAD genes are not known in cells of Lactobacillus, Pediococcus, and Oenococcus, which then are engineered for DHAD expression through introduction of a heterologous DHAD encoding gene.

[0061] Any gene encoding a DHAD enzyme may be used to provide expression of DHAD activity in a LAB cell. DHAD, also called acetohydroxy acid dehydratase, catalyzes the conversion of 2,3-dihydroxyisovalerate to α-ketoisovalerate and of 2,3-dihydroxymethylvalerate to α-ketomethylvalerate and is classified as E.C. 4.2.1.9. Coding sequences for DHADs that may be used herein may be derived from bacterial, fungal, or plant sources. DHADs that may be used may have a [4Fe-4S]2+ cluster or a [2Fe-2S]2+ cluster bound by the apoprotein. Tables 1, 2, and 3 list SEQ ID NOs for coding regions and proteins of representative DHADs that may be used in the present invention. Proteins with at least about 95% identity to those listed sequences have been omitted for simplification, but it is understood that the omitted proteins with at least about 95% sequence identity to any of the proteins listed in Tables 1, 2, and 3 and having DHAD activity may be used as disclosed herein. Additional DHAD proteins and their encoding sequences may be identified by BLAST searching of public databases, as well known to one skilled in the art. Typically BLAST (described above) searching of publicly available databases with known DHAD sequences, such as those provided herein, is used to identify DHADs and their encoding sequences that may be expressed in the present cells. For example, DHAD proteins having amino acid sequence identities of at least about 80-85%, 85%-90%, 90%-95% or 98% sequence identity to any of the DHAD proteins of Table 1 may be expressed in the present cells. Identities are based on the Clustal W method of alignment using the default parameters of GAP PENALTY=10, GAP LENGTH PENALTY=0.1, and Gonnet 250 series of protein weight matrix.

[0062] Additional [2Fe-2S]2+ DHADs may be identified using the analysis described in commonly owned and co-pending U.S. Patent Application 61/100792, which is herein incorporated by reference. The analysis is as follows: A Profile Hidden Markov Model (HMM) was prepared based on amino acid sequences of eight functionally verified DHADs. These DHA Ds are from Nitrosomonas europaea (DNA SEQ ID NO:309; protein SEQ ID NO:310), Synechocystis sp. PCC6803 (DNA SEQ ID:297; protein SEQ ID NO:298), Streptococcus mutans (DNA SEQ ID NO:167; protein SEQ ID NO:168), Streptococcus thermophilus (DNA SEQ ID NO:163; SEQ ID No:164), Ralstonia metallidurans (DNA SEQ ID NO:345; protein SEQ ID NO:346), Ralstonia eutropha (DNA SEQ ID NO:343; protein SEQ ID NO:344), and Lactococcus lactis (DNA SEQ ID NO:231; protein SEQ ID NO:232). In addition the DHAD from Flavobacterium johnsoniae (DNA SEQ ID NO:229; protein SEQ ID NO:230) was found to have dihydroxy-acid dehydratase activity when expressed in E. coli and was used in making the Profile. The Profile HMM is prepared using the HMMER software package (The theory behind profile HMMs is described in R. Durbin, S. Eddy, A. Krogh, and G. Mitchison, Biological sequence analysis: probabilistic models of proteins and nucleic acids, Cambridge University Press, 1998; Krogh et al., 1994; J. Mol. Biol. 235:1501-1531), following the user guide which is available from HMMER (Janelia Farm Research Campus, Ashburn, Va.). The output of the HMMER software program is a Profile Hidden Markov Model (HMM) that characterizes the input sequences. The Profile HMM prepared for the eight DHAD proteins is given in Table 7. Any protein that matches the Profile HMM with an E value of <10⁻⁵ is a DHAD related protein, which includes [4Fe-4S]230 DHADs, [2Fe-2S]2+ DHADs, arabonate dehydratases, and phosphogluconate dehydratases. Sequences matching the Profile HMM are then analyzed for the presence of the three conserved cysteines, corresponding to positions 56, 129, and 201 in the Streptococcus mutans DHAD. The presence of all three conserved cysteines is characteristic of proteins having a [2Fe-2S]²+ cluster. Proteins having the three conserved cysteines include arabonate dehydratases and [2Fe-2S]2+ DHADs. The [2Fe-2S]2+ DHADs may be distinguished from the arabonate dehydratases by analyzing for signature conserved amino acids found to be present in the [2Fe-2S]2+ DHADs or in the arabonate dehydratases at positions corresponding to the following positions in the Streptococcus mutans DHAD amino acid sequence. These signature amino acids are in [2Fe-2S]2+ DHADs or in arabonate dehydratases, respectively, at the following positions (with greater than 90% occurance): 88 asparagine vs glutamic acid; 113 not conserved vs glutamic acid; 142 arginine or asparagine vs not conserved; 165: not conserved vs glycine; 208 asparagine vs not conserved; 454 leucine vs not conserved; 477 phenylalanine or tyrosine vs not conserved; and 487 glycine vs not conserved.

[0063] Additionally, the sequences of DHAD coding regions provided herein may be used to identify other homologs in nature. For example each of the DHAD encoding nucleic acid fragments described herein may be used to isolate genes encoding homologous proteins. Isolation of homologous genes using sequence-dependent protocols is well known in the art. Examples of sequence-dependent protocols include, but are not limited to: 1.) methods of nucleic acid hybridization; 2.) methods of DNA and RNA amplification, as exemplified by various uses of nucleic acid amplification technologies [e.g., polymerase chain reaction (PCR), Mullis et al., U.S. Pat. No. 4,683,202; ligase chain reaction (LCR), Tabor, S. et al., Proc. Acad. Sci. USA 82:1074 (1985); or strand displacement amplification (SDA), Walker, et al., Proc. Natl. Acad. Sci. U.S.A., 89:392 (1992)]; and 3.) methods of library construction and screening by complementation.

[0064] For example, genes encoding similar proteins or polypeptides to the DHAD encoding genes provided herein could be isolated directly by using all or a portion of the instant nucleic acid fragments as DNA hybridization probes to screen libraries from any desired organism using methodology well known to those skilled in the art. Specific oligonucleotide probes based upon the disclosed nucleic acid sequences can be designed and synthesized by methods known in the art (Maniatis, supra). Moreover, the entire sequences can be used directly to synthesize DNA probes by methods known to the skilled artisan (e.g., random primers DNA labeling, nick translation or end-labeling techniques), or RNA probes using available in vitro transcription systems. In addition, specific primers can be designed and used to amplify a part of (or full-length of) the instant sequences. The resulting amplification products can be labeled directly during amplification reactions or labeled after amplification reactions, and used as probes to isolate full-length DNA fragments by hybridization under conditions of appropriate stringency.

[0065] Typically, in PCR-type amplification techniques, the primers have different sequences and are not complementary to each other. Depending on the desired test conditions, the sequences of the primers should be designed to provide for both efficient and faithful replication of the target nucleic acid. Methods of PCR primer design are common and well known in the art (Thein and Wallace, “The use of oligonucleotides as specific hybridization probes in the Diagnosis of Genetic Disorders”, in Human Genetic Diseases: A Practical Approach, K. E. Davis Ed., (1986) pp 33-50, IRL: Herndon, Va.; and Rychlik, W., In Methods in Molecular Biology, White, B. A. Ed., (1993) Vol. 15, pp 31-39, PCR Protocols: Current Methods and Applications. Humania: Totowa, N.J.).

[0066] Generally two short segments of the described sequences may be used in polymerase chain reaction protocols to amplify longer nucleic acid fragments encoding homologous genes from DNA or RNA. The polymerase chain reaction may also be performed on a library of cloned nucleic acid fragments wherein the sequence of one primer is derived from the described nucleic acid fragments, and the sequence of the other primer takes advantage of the presence of the polyadenylic acid tracts to the 3′ end of the mRNA precursor encoding microbial genes.

[0067] Alternatively, the second primer sequence may be based upon sequences derived from the cloning vector. For example, the skilled artisan can follow the RACE protocol (Frohman et al., PNAS USA 85:8998 (1988)) to generate cDNAs by using PCR to amplify copies of the region between a single point in the transcript and the 3′ or 5′ end. Primers oriented in the 3′ and 5′ directions can be designed from the instant sequences. Using commercially available 3′ RACE or 5′ RACE systems (e.g., BRL, Gaithersburg, Md.), specific 3′ or 5′ cDNA fragments can be isolated (Ohara et al., PNAS USA 86:5673 (1989); Loh et al., Science 243:217 (1989)).

[0068] Alternatively, the provided DHAD encoding sequences may be employed as hybridization reagents for the identification of homologs. The basic components of a nucleic acid hybridization test include a probe, a sample suspected of containing the gene or gene fragment of interest, and a specific hybridization method. Probes are typically single-stranded nucleic acid sequences that are complementary to the nucleic acid sequences to be detected. Probes are “hybridizable” to the nucleic acid sequence to be detected. The probe length can vary from 5 bases to tens of thousands of bases, and will depend upon the specific test to be done. Typically a probe length of about 15 bases to about 30 bases is suitable. Only part of the probe molecule need be complementary to the nucleic acid sequence to be detected. In addition, the complementarity between the probe and the target sequence need not be perfect. Hybridization does occur between imperfectly complementary molecules with the result that a certain fraction of the bases in the hybridized region are not paired with the proper complementary base.

[0069] Hybridization methods are well defined. Typically the probe and sample must be mixed under conditions that will permit nucleic acid hybridization. This involves contacting the probe and sample in the presence of an inorganic or organic salt under the proper concentration and temperature conditions. The probe and sample nucleic acids must be in contact for a long enough time that any possible hybridization between the probe and sample nucleic acid may occur. The concentration of probe or target in the mixture will determine the time necessary for hybridization to occur. The higher the probe or target concentration, the shorter the hybridization incubation time needed. Optionally, a chaotropic agent may be added. The chaotropic agent stabilizes nucleic acids by inhibiting nuclease activity. Furthermore, the chaotropic agent allows sensitive and stringent hybridization of short oligonucleotide probes at room temperature (Van Ness and Chen, Nucl. Acids Res. 19:5143-5151 (1991)). Suitable chaotropic agents include guanidinium chloride, guanidinium thiocyanate, sodium thiocyanate, lithium tetrachloroacetate, sodium perchlorate, rubidium tetrachloroacetate, potassium iodide and cesium trifluoroacetate, among others. Typically, the chaotropic agent will be present at a final concentration of about 3 M. If desired, one can add formamide to the hybridization mixture, typically 30-50% (v/v).

[0070] Various hybridization solutions can be employed. Typically, these comprise from about 20 to 60% volume, preferably 30%, of a polar organic solvent. A common hybridization solution employs about 30-50% v/v formamide, about 0.15 to 1 M sodium chloride, about 0.05 to 0.1 M buffers (e.g., sodium citrate, Tris-HCl, PIPES or HEPES (pH range about 6-9)), about 0.05 to 0.2% detergent (e.g., sodium dodecylsulfate), or between 0.5-20 mM EDTA, FICOLL (Pharmacia Inc.) (about 300-500 kdal), polyvinylpyrrolidone (about 250-500 kdal) and serum albumin. Also included in the typical hybridization solution will be unlabeled carrier nucleic acids from about 0.1 to 5 mg/mL, fragmented nucleic DNA (e.g., calf thymus or salmon sperm DNA, or yeast RNA), and optionally from about 0.5 to 2% wt/vol glycine. Other additives may also be included, such as volume exclusion agents that include a variety of polar water-soluble or swellable agents (e.g., polyethylene glycol), anionic polymers (e.g., polyacrylate or polymethylacrylate) and anionic saccharidic polymers (e.g., dextran sulfate).

[0071] Nucleic acid hybridization is adaptable to a variety of assay formats. One of the most suitable is the sandwich assay format. The sandwich assay is particularly adaptable to hybridization under non-denaturing conditions. A primary component of a sandwich-type assay is a solid support. The solid support has adsorbed to it or covalently coupled to it immobilized nucleic acid probe that is unlabeled and complementary to one portion of the sequence.

[0072] LAB cells are genetically modified for expression of DHAD activity using methods well known to one skilled in the art. Expression of DHAD is generally achieved by transforming suitable LAB host cells with a sequence encoding a DHAD protein. Typically the coding sequence is part of a chimeric gene used for transformation, which includes a promoter operably linked to the coding sequence as well as a ribosome binding site and a termination control region. The coding region may be from the host cell for transformation and combined with regulatory sequences that are not native to the natural gene encoding DHAD. Alternatively, the coding region may be from another host cell.

[0073] Codons may be optimized for expression based on codon usage in the selected host, as is known to one skilled in the art. Vectors useful for the transformation of a variety of host cells are common and described in the literature. Typically the vector contains a selectable marker and sequences allowing autonomous replication or chromosomal integration in the desired host. In addition, suitable vectors may comprise a promoter region which harbors transcriptional initiation controls and a transcriptional termination control region, between which a coding region DNA fragment may be inserted, to provide expression of the inserted coding region. Both control regions may be derived from genes homologous to the transformed host cell, although it is to be understood that such control regions may also be derived from genes that are not native to the specific species chosen as a production host.

[0074] Initiation control regions or promoters, which are useful to drive expression of a DHAD coding region in LAB are familiar to those skilled in the art. Some examples include the amy, apr, and npr promoters; nisA promoter (useful for expression Gram-positive bacteria (Eichenbaum et al. Appl. Environ. Microbiol. 64(8):2763-2769 (1998)); and the synthetic P11 promoter (useful for expression in Lactobacillus plantarum, Rud et al., Microbiology 152:1011-1019 (2006)). In addition, the IdhL1 and fabZ1 promoters of L plantarum are useful for expression of chimeric genes in LAB. The fabZ1 promoter directs transcription of an operon with the first gene, fabZ1, encoding (3R)-hydroxymyristoyl-[acyl carrier protein] dehydratase.

[0075] Termination control regions may also be derived from various genes, typically from genes native to the preferred hosts. Optionally, a termination site may be unnecessary; however, it is most preferred if included.

[0076] Vectors useful in LAB include vectors having two origins of replication and one or two selectable markers which allow for replication and selection in both Escherichia coli and LAB. Examples are pFP996(SEQ ID NO:565) and pDM1 (SEQ ID NO:563), which are useful in L. plantarum.and other LAB. Many plasmids and vectors used in the transformation of Bacillus subtilis and Streptococcus may be used generally for LAB. Non-limiting examples of suitable vectors include pAMβ1 and derivatives thereof (Renault et al., Gene 183:175-182 (1996); and O'Sullivan et al., Gene 137:227-231 (1993)); pMBB1 and pHW800, a derivative of pMBB1 (Wyckoff et al. Appl. Environ. Microbiol. 62:1481-1486 (1996)); pMG1, a conjugative plasmid (Tanimoto et al., J. Bacteriol. 184:5800-5804 (2002)); pNZ9520 (Kleerebezem et al., Appl. Environ. Microbiol. 63:4581-4584 (1997)); pAM401 (Fujimoto et al., Appl. Environ. Microbiol. 67:1262-1267 (2001)); and pAT392 (Arthur et al., Antimicrob. Agents Chemother. 38:1899-1903 (1994)). Several plasmids from Lactobacillus plantarum have also been reported (e.g., van Kranenburg et al. Appl. Environ. Microbiol. 2005 March; 71(3): 1223-1230).

[0077] Vectors may be introduced into a host cell using methods known in the art, such as electroporation (Cruz-Rodz et al. Molecular Genetics and Genomics 224:1252-154 (1990), Bringel, et al. Appl. Microbiol. Biotechnol. 33: 664-670 (1990), Alegre et al., FEMS Microbiology letters 241:73-77 (2004)), and conjugation (Shrago et al., Appl. Environ. Microbiol. 52:574-576 (1986)). A chimeric DHAD gene can also be integrated into the chromosome of LAB using integration vectors (Hols et al., Appl. Environ. Microbiol. 60:1401-1403 (1990), Jang et al., Micro. Lett. 24:191-195 (2003)).

### Fe—S Cluster Forming Proteins

[0078] Disclosed herein are recombinant LAB cells that express DHAD and are engineered for expression of proteins involved in formation of Fe—S clusters. Two or more proteins are involved in several systems that are known to form Fe—S clusters, which may include proteins that acquire iron and sulfur, assemble Fe—S clusters, and transfer Fe—S clusters to apoproteins. The DHAD protein requires either a [2Fe-2S]2+ cluster or a [4Fe-4S]2+ cluster to be active, depending on the specific DHAD. Applicants have found that increasing the expression of Fe—S cluster forming proteins effectively increased the activity of DHAD in LAB cells.

[0079] Expression of any set of proteins for Fe—S cluster formation may be used to increase DHAD activity in LAB cells. There are three known groups of Fe—S cluster forming proteins. These proteins are encoded by three types of operons: the Suf operon, the Isc operon, and the Nif operon.

[0080] The putative Suf operons of Lactococcus lactis and of Lactobacillus plantarum were identified by applicants by the presence of coding regions with sequence homologies to suf coding regions from other organisms. Disclosed herein is the first demonstration that expression of the set of genes including putative sufC, putative sufD, putative sufS, putative sufU, and putative sufB of L. plantarum affect function of an Fe—S protein. Similarly, disclosed herein is the first demonstration that expression of the set of genes including putative sufC, putative sufD, putative sufS, yseH (encoding hypothetical protein), putative nifU, and putative sufB of L. lactis affect function of an Fe—S protein. Applicants have shown in Example 3 herein, that expression of the identified Lactococcus lactis suf operon in a Lactobacillus plantarum strain with the endogenous suf operon deleted allowed expression of activity of an introduced DHAD while there as no DHAD acitvity in the Lactobacillus plantarum deletion strain with no Lactococcus lactis suf operon. Applicants have shown in Example 5 herein, that increased expression of the identified endogenous Lactobacillus plantarum suf operon provided increased activity of an expressed DHAD.

[0081] The Suf operons of L. plantarum and L. lactis are shown in FIGS. 1 and 2, respectively. SufS is a cysteine desulfurase which provides the sulfur for the cluster, and SufU is a scaffold protein that acts as a sulfur and iron acceptor. Functions of SufC and SufD are not established, though SufC has ATPase activity, Suf B has cysteine desulfurase activator activity and a SufBCD complex has similarity to components of ATP-binding cassette transporter proteins. The E. coli Suf operon, shown in FIG. 3, includes SufE, another cysteine desulfurase activator. In addition, SufU is not present and is replaced by a different scaffold protein, SufA. Thus there is some variation in the set of Fe—S cluster forming proteins that is included in a Suf operon depending on the source organism. Any set of Fe—S cluster forming Suf operon proteins may be expressed in the LAB cells disclosed herein. Representative examples of these proteins and their coding regions, with SEQ ID NOs, are given in Table 4. Typically a set of coding regions that is used in preparing the LAB cells disclosed herein is derived from a single operon. However, coding regions for proteins that have high sequence identities may be interchanged for one another in a set of Fe—S cluster forming proteins. For example, the SufS protein from L. lactis may be used together with the SufC, SufD, SufU, and SufB proteins of Lactobacillus reuteri whose SufS has 74% identity, or of Lactobacillus fermentum whose SufS has 72% identity, each to the SufS of L lactis. Also the SufS of L. plantarum may be interchanged. Though it has 62% identity with SufS of L. lactis, considering conservative amino acid changes the similarity is 80%. One skilled in the art will recognize that generally proteins with sequence identities of at least about 70%, 75%, 80%, 85%, 90%, 95% or greater may be substituted for each other in a set of Fe—S cluster forming proteins. With similarities of about 60%, 65%, 70%, 75%, 80%, 85%, 90%, 95% or greater, Suf proteins may be interchangeable if the amino acid changes are conservative for a final similarity of 70%, 75%, 80%, 85%, 90%, 95% or greater based on the Clustal W method of alignment using the default parameters of GAP PENALTY=10, GAP LENGTH PENALTY=0.1, and Gonnet 250 series of protein weight matrix over the full length of the protein sequence.

[0082] Proteins of a Suf operon derived from a wide variety of LAB and other related bacteria may be used in the LAB cells disclosed herein. The SufS proteins and coding regions representing the Fe—S cluster forming protein operons of a variety of organisms that may be used herein are given in Table 4. Each of the sufS coding regions given in Table 4 is a part of a Suf operon. One skilled in the art can readily use the sufS coding region or protein sequence of an organism that is given in Table 4 as a sequence probe to identify the entire Suf operon from that organism in publicly available sequence databases. Each individual suf gene coding region may be identified using BLAST sequence analysis of individual coding or protein sequences, as described above, to identify the corresponding coding sequence from a desired organism. The suf gene sequences given in Table 4, for example, may be used as the gene probe sequences. Alternatively, annotations present in publicly available databases may be used to identify suf genes.

[0083] Fe—S cluster forming proteins may also be found in an Isc operon. The Isc operon of E. coli, for example, includes coding regions for the proteins IscS, IscU, IscA, HscB, HscA, Fdx and IscX, whose sequences are listed in Table 5, with SEQ ID NOs, and operon diagram is shown in FIG. 4. Expression of the operon is negatively regulated by IscR, encoded by an adjacent sequence (FIG. 4) but that is not part of the Fe—S cluster forming set of proteins in the Isc operon. IscS is a cysteine desulfurase that transfers sulfur to the scaffold protein IscU. IscA binds iron and provides iron to IscU. HscA, also called Hsc66, is a chaperone (member of the Hsp70 protein family) whose ATPase activity is stimulated by IscU in the presence of the co-chaperone HscB, also called Hsc20. FdX is a ferredoxin which may function as an intermediate site for Fe—S cluster assembly. IscX interacts with IscS, but may not be necessary for Fe—S cluster formation. Any Isc operon Fe—S cluster forming proteins may be used in the LAB cells disclosed herein.

[0084] Fe—S cluster forming proteins may also be found in a Nif operon. The Nif operon of Wolinella succinogenes, for example, includes coding regions for the proteins NifS and NifU, whose sequences are listed in Table 5 and operon diagram is shown in FIG. 5. NifS is a cysteine desulfurase and NifU is a scaffold protein. Any Nif operon Fe—S cluster forming proteins may be used in the LAB cells disclosed herein.

[0085] A set of Fe—S cluster forming proteins, as described above, may be expressed in LAB cells as one recombinant genetic expression element that includes the coding regions as they are present in their natural operon, operably linked to a promoter and 3′ termination sequence. Alternatively, a set of Fe—S cluster forming proteins may be expressed in more than one operon or each as an individual chimeric gene, all of which are called recombinant genetic expression elements. One skilled in the art can readily choose and implement any of these methods of expressing two or more proteins that are a set of Fe—S cluster forming proteins.

[0086] An additional approach to increase the expression of Fe—S cluster forming proteins comprises replacing or augmenting the promoter of an endogenous gene whose product is known or predicted to be involved in Fe—S cluster assembly or the promoter for an operon containing genes whose products are known or predicted to be involved in Fe—S cluster assembly. The endogenous promoter may be replaced by a high expression promoter or augmented by additional copies of the native promoter or a non-native promoter. Suitable promoters and methods are well known in the art.

[0087] Promoters, termination control regions, and vectors used for expressing Fe—S cluster forming proteins as recombinant genetic expression elements that are individual chimeric genes or one or multiple operons in LAB cells are the same as described above for expression of DHAD coding regions.

### Isobutanol and Other Products

[0088] Isobutanol and any other product made from a biosynthetic pathway including DHAD activity may be produced with greater effectiveness in a LAB cell disclosed herein having a functional dihydroxy-acid dehydratase polypeptide and at least one recombinant genetic expression element encoding iron-sulfur cluster forming proteins. Such products include, but are not limited to valine, isoleucine, leucine, pantothenic acid (vitamin B5), 2-methyl-1-butanol, 3-methyl-1-butanol, and isobutanol.

[0089] For example, biosynthesis of valine includes steps of acetolactate conversion to 2,3-dihydroxy-isovalerate by acetohydroxyacid reductoisomerase (ilvC), conversion of 2,3-dihydroxy-isovalerate to α-ketoisovalerate (also called 2-keto-isovalerate) by dihydroxy-acid dehydratase (ilvD), and conversion of a-ketoisovalerate to valine by branched-chain amino acid aminotransferase (ilvE). Biosynthesis of leucine includes the same steps to α-ketoisovalerate, followed by conversion of α-ketoisovalerate to leucine by enzymes encoded by leuA (2-isopropylmalaate synthase), leuCD (isopropylmalate isomerase), leuB (3-isopropylmalate dehydrogenase), and tyrB/ilvE (aromatic amino acid transaminase). Biosynthesis of pantothenate includes the same steps to α-ketoisovalerate, followed by conversion of α-ketoisovalerate to pantothenate by enzymes encoded by panB (3-methyl-2-oxobutanoate hydroxymethyltransferase), panE (2-dehydropantoate reductae), and panC (pantoate-beta-alanine ligase). Engineering expression of enzymes for enhanced production of pantothenic acid in microorganisms is described in U.S. Pat. No. 6,177,264. Increased conversion of 2,3-dihydroxy-isovalerate to α-ketoisovalerate will increase flow in these pathways, particularly if one or more additional enzymes of a pathway is overexpressed. Thus it is desired for production of, for example, valine, leucine, or pantothenate to use an engineered LAB cell disclosed herein.

[0090] The α-ketoisovalerate product of DHAD is an intermediate in isobutanol biosynthetic pathways disclosed in commonly owned and co-pending US Patent Publication 20070092957 A1, which is herein incorporated by reference. A diagram of the disclosed isobutanol biosynthetic pathways is provided in FIG. 6. Production of isobutanol in a strain disclosed herein benefits from increased DHAD activity. As described in US 20070092957 A1, steps in an example isobutanol biosynthetic pathway include conversion of:
[0091] pyruvate to acetolactate (FIG. 6 pathway step a), as catalyzed for example by acetolactate synthase,
[0092] acetolactate to 2,3-dihydroxyisovalerate (FIG. 6 pathway step b) as catalyzed for example by acetohydroxy acid isomeroreductase;
[0093] 2,3-dihydroxyisovalerate to a-ketoisovalerate (FIG. 6 pathway step c) as catalyzed for example by acetohydroxy acid dehydratase, also called dihydroxy-acid dehydratase (DHAD);
[0094] α-ketoisovalerate to isobutyraldehyde (FIG. 6 pathway step d) as catalyzed for example by branched-chain a-keto acid decarboxylase; and
[0095] isobutyraldehyde to isobutanol (FIG. 6 pathway step e) as catalyzed for example by branched-chain alcohol dehydrogenase.

[0096] The substrate to product conversions and enzymes involved in these reactions, and for steps f, g, h, l, j, and k of alternative pathways shown in FIG. 6, are described in US 20070092957 A1.

[0097] Genes that may be used for expression of the pathway step enzymes named above other than the DHADs disclosed herein, as well as those for two additional isobutanol pathways, are described in US 20070092957 A1, and additional genes that may be used can be identified by one skilled in the art through bioinformatics or experimentally as described above. The preferred use in all three pathways of ketol-acid reductoisomerase (KARI) enzymes with particularly high activities is disclosed in commonly owned and co-pending US Patent Pub No. 20080261230. Examples of high activity KARIs disclosed therein are those from Vibrio cholerae (DNA: SEQ ID NO:545; protein SEQ ID NO:546), Pseudomonas aeruginosa PAO1, (DNA: SEQ ID NO:551; protein SEQ ID NO:552), and Pseudomonas fluorescens PF5 (DNA: SEQ ID NO:547; protein SEQ ID NO:548).

[0098] Additionally described in US 20070092957 A1 are construction of chimeric genes and genetic engineering of bacteria for isobutanol production using the disclosed biosynthetic pathways. Expression of these enzymes in LAB is as described above for expression of DHADs.

### Growth for Production

[0099] Recombinant LAB cells disclosed herein may be used for fermentation production of isobutanol and other products as follows. The recombinant cells are grown in fermentation media which contains suitable carbon substrates. Suitable substrates may include but are not limited to monosaccharides such as glucose and fructose, or mixtures of monosaccharides, including C5 sugars such as xylose and arabinose, oligosaccharides such as lactose or sucrose, polysaccharides such as starch or cellulose or mixtures thereof and unpurified mixtures from renewable feedstocks such as cheese whey permeate, cornsteep liquor, sugar beet molasses, and barley malt.

[0100] Although it is contemplated that all of the above mentioned carbon substrates and mixtures thereof are suitable in the present invention, preferred carbon substrates are glucose, fructose, and sucrose. Sucrose may be derived from renewable sugar sources such as sugar cane, sugar beets, cassava, sweet sorghum, and mixtures thereof. Glucose and dextrose may be derived from renewable grain sources through saccharification of starch based feedstocks including grains such as corn, wheat, rye, barley, oats, and mixtures thereof. In addition, fermentable sugars may be derived from renewable cellulosic or lignocellulosic biomass through processes of pretreatment and saccharification, as described, for example, in co-owned and co-pending U.S. Patent Application Publication No. 2007/0031918A1, which is herein incorporated by reference. Biomass refers to any cellulosic or lignocellulosic material and includes materials comprising cellulose, and optionally further comprising hemicellulose, lignin, starch, oligosaccharides and/or monosaccharides. Biomass may also comprise additional components, such as protein and/or lipid. Biomass may be derived from a single source, or biomass can comprise a mixture derived from more than one source; for example, biomass may comprise a mixture of corn cobs and corn stover, or a mixture of grass and leaves. Biomass includes, but is not limited to, bioenergy crops, agricultural residues, municipal solid waste, industrial solid waste, sludge from paper manufacture, yard waste, wood and forestry waste. Examples of biomass include, but are not limited to, corn grain, corn cobs, crop residues such as corn husks, corn stover, grasses, wheat, wheat straw, barley, barley straw, hay, rice straw, switchgrass, waste paper, sugar cane bagasse, sorghum, soy, components obtained from milling of grains, trees, branches, roots, leaves, wood chips, sawdust, shrubs and bushes, vegetables, fruits, flowers, animal manure, and mixtures thereof.

[0101] In addition to an appropriate carbon source, fermentation media must contain suitable minerals, salts, cofactors, buffers and other components, known to those skilled in the art, suitable for the growth of the cultures and promotion of the enzymatic pathway necessary for isobutanol production.

[0102] Typically cells are grown at a temperature in the range of about 25° C. to about 40° C. in an appropriate medium. Suitable growth media are common commercially prepared media such as Bacto Lactobacilli MRS broth or Agar (Difco), Luria Bertani (LB) broth, Sabouraud Dextrose (SD) broth or Yeast Medium (YM) broth. Other defined or synthetic growth media may also be used, and the appropriate medium for growth of the particular bacterial strain will be known by one skilled in the art of microbiology or fermentation science. The use of agents known to modulate catabolite repression directly or indirectly, e.g., cyclic adenosine 2′:3′-monophosphate, may also be incorporated into the fermentation medium.

[0103] Suitable pH ranges for the fermentation are between pH 5.0 to pH 9.0, where pH 6.0 to pH 8.0 is preferred as the initial condition.

[0104] Fermentations may be performed under aerobic or anaerobic conditions, where anaerobic or microaerobic conditions are preferred.

[0105] Isobutanol, or other product, may be produced using a batch method of fermentation. A classical batch fermentation is a closed system where the composition of the medium is set at the beginning of the fermentation and not subject to artificial alterations during the fermentation. A variation on the standard batch system is the fed-batch system. Fed-batch fermentation processes are also suitable in the present invention and comprise a typical batch system with the exception that the substrate is added in increments as the fermentation progresses. Fed-batch systems are useful when catabolite repression is apt to inhibit the metabolism of the cells and where it is desirable to have limited amounts of substrate in the media. Batch and fed-batch fermentations are common and well known in the art and examples may be found in Thomas D. Brock in Biotechnology: A Textbook of Industrial Microbiology, Second Edition (1989) Sinauer Associates, Inc., Sunderland, Mass., or Deshpande, Mukund V., Appl. Biochem. Biotechnol., 36:227, (1992), herein incorporated by reference.

[0106] Isobutanol, or other product, may also be produced using continuous fermentation methods. Continuous fermentation is an open system where a defined fermentation medium is added continuously to a bioreactor and an equal amount of conditioned media is removed simultaneously for processing. Continuous fermentation generally maintains the cultures at a constant high density where cells are primarily in log phase growth. Continuous fermentation allows for the modulation of one factor or any number of factors that affect cell growth or end product concentration. Methods of modulating nutrients and growth factors for continuous fermentation processes as well as techniques for maximizing the rate of product formation are well known in the art of industrial microbiology and a variety of methods are detailed by Brock, supra.

[0107] It is contemplated that the production of isobutanol, or other product, may be practiced using batch, fed-batch or continuous processes and that any known mode of fermentation would be suitable. Additionally, it is contemplated that cells may be immobilized on a substrate as whole cell catalysts and subjected to fermentation conditions for isobutanol production.

Methods for Isobutanol Isolation from the Fermentation Medium

[0108] Bioproduced isobutanol may be isolated from the fermentation medium using methods known in the art for ABE fermentations (see for example, Durre, Appl. Microbiol. Biotechnol. 49:639-648 (1998), Groot et al., Process. Biochem. 27:61-75 (1992), and references therein). For example, solids may be removed from the fermentation medium by centrifugation, filtration, decantation, or the like. Then, the isobutanol may be isolated from the fermentation medium using methods such as distillation, azeotropic distillation, liquid-liquid extraction, adsorption, gas stripping, membrane evaporation, or pervaporation.

### Examples

[0109] The present invention is further defined in the following Examples. It should be understood that these Examples, while indicating preferred embodiments of the invention, are given by way of illustration only. From the above discussion and these Examples, one skilled in the art can ascertain the essential characteristics of this invention, and without departing from the spirit and scope thereof, can make various changes and modifications of the invention to adapt it to various uses and conditions.

[0110] The meaning of abbreviations used is as follows: “min” means minute(s), “h” means hour(s), “sec’ means second(s), “μl” means microliter(s), “ml” means milliliter(s), “L” means liter(s), “nm” means nanometer(s), “mm” means millimeter(s), “cm” means centimeter(s), “μm” means micrometer(s), “mM” means millimolar, “M” means molar, “mmol” means millimole(s), “μmole” means micromole(s), “g” means gram(s), “μg” means microgram(s), “mg” means milligram(s), “rpm” means revolutions per minute, “w/v” means weight/volume, “OD” means optical density, and “OD600” means optical density measured at a wavelength of 600 nm.

### General Methods:

[0111] Standard recombinant DNA and molecular cloning techniques used in the Examples are well known in the art and are described by Sambrook, J., Fritsch, E. F. and Maniatis, T., Molecular Cloning: A Laboratory Manual, Cold Spring Harbor Laboratory Press, Cold Spring Harbor, N.Y., 1989, by T. J. Silhavy, M. L. Bennan, and L. W. Enquist, Experiments with Gene Fusions, Cold Spring Harbor Laboratory, Cold Spring Harbor, N.Y., 1984, and by Ausubel, F. M. et al., Current Protocols in Molecular Biology, Greene Publishing Assoc. and Wiley-Interscience, N.Y., 1987. Materials and methods suitable for the maintenance and growth of bacterial cultures are also well known in the art. Techniques suitable for use in the following Examples may be found in Manual of Methods for General Bacteriology, Phillipp Gerhardt, R. G. E. Murray, Ralph N. Costilow, Eugene W. Nester, Willis A. Wood, Noel R. Krieg and G. Briggs Phillips, eds., American Society for Microbiology, Washington, D.C., 1994, or by Thomas D. Brock in Biotechnology: A Textbook of Industrial Microbiology, Second Edition, Sinauer Associates, Inc., Sunderland, Mass., 1989. All reagents, restriction enzymes and materials used for the growth and maintenance of bacterial cells were obtained from Aldrich Chemicals (Milwaukee, Wis.), BD Diagnostic Systems (Sparks, Md.), Life Technologies (Rockville, Md.), or Sigma Chemical Company (St. Louis, Mo.), unless otherwise specified.

### Example 1

### Lactobacillus plantarum PN0512 suf Operon Deletion

[0112] The purpose of this example is to describe the deletion of the suf operon in Lactobacillus plantarum PN0512 (ATCC strain #PTA-7727) to create the Lactobacillus plantarum strain PN0512Δsuf. This operon contains genes whose products are predicted to be involved in Fe—S cluster assembly. The coding regions of the operon were identified by sequence homology to suf gene coding regions that are present in publicly available sequence databases.

[0113] The deletion was constructed by a two-step homologous recombination procedure to yield an unmarked deletion using methods previously described (Ferain et al., 1994, J. Bact. 176:596). The procedure utilized a shuttle vector, pFP996 (SEQ ID NO:553). It can replicate in both E. coli and gram-postive bacteria. It contains the origins of replication from pBR322 (nucleotides #2628 to 5323) and pE194 (nucleotides #43 to 2627). pE194 is a small plasmid isolated originally from a gram positive bacterium, Staphylococcus aureus (Horinouchi and Weisblum J. Bacteriol. (1982) 150(2):804-814). In pFP996, the multiple cloning sites (nucleotides #1 to 50) contain restriction sites for EcoRI, BgIII, XhoI, SmaI, ClaI, KpnI, and HindIII. There are two antibiotic resistance markers; one is for resistance to ampicillin and the other for resistance to erythromycin. For selection purposes, ampicillin was used for transformation in E. coli and erythromycin was used for selection in L. plantarum. Two segments of DNA containing sequences upstream and downstream of the intended deletion were cloned into the plasmid to provide the regions of homology for two genetic crossovers. The initial single crossover integrated the plasmid into the chromosome. The second crossover event yielded either the wild type sequence or the intended gene deletion.

[0114] The recombination plasmid was constructed using standard molecular biology methods known in the art. All restriction and modifying enzymes and Phusion High-Fidelity PCR Master Mix were purchased from New England Biolabs (Ipswich, Mass.). DNA fragments were purified with Qiaquick PCR Purification Kit (Qiagen Inc., Valencia, Calif.). Plasmid DNA was prepared with QIAprep Spin Miniprep Kit (Qiagen Inc., Valencia, Calif.). L. plantarum PN0512 genomic DNA was prepared with MasterPure DNA Purification Kit (Epicentre, Madison, Wis.). Oligoucleotides were synthesized by Sigma-Genosys (Woodlands, Tex.). The vector construct was confirmed by DNA sequencing.

[0115] The homologous DNA arms were designed such that the deletion would encompass the majority of the first gene through the 5′ end of the last gene in the operon, which is shown in FIG. 1A. The deleted sequence, as shown in FIG. 1B, started at 94 base pairs into the sufC coding sequence through 215 base pairs of the sufB coding sequence. The homologous arms cloned into the plasmid were approximately 1100 (left arm) and 1200 (right arm) base pairs long separated by 12 base pairs (XhoI and XmaI restriction sites). The suf operon left homologous arm was amplified from L. plantarum PN0512 genomic DNA with primers oBP97 (SEQ ID NO:554), containing an EcoRI site, and oBP98 (SEQ ID NO:555), containing an XhoI site using Phusion High-Fidelity PCR Master Mix. The suf operon right homologous arm was amplified from L. plantarum PN0512 genomic DNA with primers oBP101 (SEQ ID NO:556), containing an XmaI site and oBP102 (SEQ ID NO:557), containing a KpnI site using Phusion High-Fidelity PCR Master Mix. The suf operon left homologous arm was digested with EcoRI and XhoI and the suf operon right homologous arm was digested with XmaI and KpnI. The two homologous arms were ligated with T4 DNA Ligase into the corresponding restriction sites of pFP996, after digestion with the appropriate restriction enzymes, to generate the vector pFP996-suf-arms.

[0116] Deletion of the suf operon was obtained by transforming Lactobacillus plantarum PN0512 with pFP996-suf-arms. 5 ml of Lactobacilli MRS medium (7406, Accumedia, Neogen Corporation, Lansing, Mich.) containing 1% glycine (G8898, Sigma-Aldrich, St. Louis, Mo.) was inoculated with PN0512 and grown overnight at 30° C. 100 ml MRS medium with 1% glycine was inoculated with overnight culture to an OD600 of 0.1 and grown to an OD600 of 0.7 at 30° C. Cells were harvested at 3700×g for 8 min at 4° C., washed with 100 ml cold 1 mM MgCl₂ (M8266, Sigma-Aldrich, St. Louis, Mo.), centrifuged at 3700×g for 8 min at 4° C., washed with 100 ml cold 30% PEG-1000 (81188, Sigma-Aldrich, St. Louis, Mo.), recentrifuged at 3700×g for 20 min at 4° C., then resuspended in 1 ml cold 30% PEG-1000. 60 μl of cells were mixed with ˜100 ng of plasmid DNA in a cold 1 mm gap electroporation cuvette and electroporated in a BioRad Gene Pulser (Hercules, Calif.) at 1.7 kV, 25 μF, and 400Ω. Cells were resuspended in 1 ml MRS medium containing 500 mM sucrose (S9378, Sigma-Aldrich, St. Louis, Mo.) and 100 mM MgCl₂, incubated at 30° C. for 2 hrs, and then plated on MRS medium plates containing 2 μg/ml of erythromycin (E5389, Sigma-Aldrich, St. Louis, Mo.).

[0117] Transformants were screened by PCR using plasmid specific primers oBP42 (SEQ ID ON:558) and oBP57 (SEQ ID NO:559). Transformants were grown at 30° C. in Lactobacilli MRS medium with erythromycin (3 μg/ml) for approximately 10 generations and then at 37° C. for approximately 45 generations by serial inoculations in Lactobacilli MRS medium. The cultures were plated on Lactobacilli MRS medium with erythromycin (1 μg/ml).The isolates were screened by colony PCR for a single crossover with chromosomal specific primer oBP125 [SEQ ID No. 560] and plasmid specific primer oBP42 (SEQ ID NO:558), and chromosomal specific primer oBP127 9SEQ ID NO:561) and plasmid specific primer oBP57 (SEQ ID NO:559).

[0118] Subsequently, single crossover integrants were grown at 37° C. for approximately 44 generations by serial inoculations in Lactobacilli MRS medium. The cultures were plated on MRS medium. Colonies were patched to MRS plates and grown at 37° C. The isolates were then patched onto MRS medium with erythromycin (1 μg/ml). Erythromycin sensitive isolates were screened by (colony) PCR for the presence of a wild-type or deletion second crossover using chromosomal specific primers oBP125 (SEQ ID NO:560) and oBP127 (SEQ ID NO:561). A wild-type sequence yielded a 6400 by product and a deletion sequence yielded a 2500 by product. The deletion was confirmed by sequencing the PCR product while the absence of plasmid was tested by colony PCR using plasmid specific primers oBP42 (SEQ ID NO:558) and oBP57 (SEQ ID NO:559).

### Example 2

### Construction of Plasmid pDM1-ilvD(L. lactis)-suf(L. lactis)

[0119] The purpose of this example is to describe cloning of the ilvD coding region (SEQ ID NO:231) and suf operon (SEQ ID NO:881) from Lactococcus lactis subsp lactis NCDO2118 (NCIMB 702118) [Godon et al., J. Bacteriol. (1992) 174:6580-6589]. The Lactococcus lactis suf operon comprises ysfB (sufC), ysfB (sufC), ysfA (sufD), yseI (sufS), yseH (hypothetical protein), nifU, and yseF (sufB) genes as diagrammed in FIG. 2)

[0120] A shuttle vector pDM1 (SEQ ID NO:571) was used for cloning and expression of the ilvD coding region and suf operon from Lactococcus lactis subsp lactis NCDO2118 (NCIMB 702118) in Lactobacillus plantarum PN0512 (ATCC PTA-7727). Plasmid pDM1 contains a minimal pLF1 replicon (˜0.7 Kbp) and pemK-pemI toxin-antitoxin (TA) from Lactobacillus plantarum ATCC14917 plasmid pLF1, a P15A replicon from pACYC184, chloramphenicol resistance marker for selection in both E. coli and L. plantarum, and P30 synthetic promoter [Rud et al., Microbiology (2006) 152:1011-1019]. Plasmid pLF1 (C.-F. Lin et al., GenBank accession no. AF508808) is closely related to plasmid p256 [Sørvig et al., Microbiology (2005) 151:421-431], whose copy number was estimated to be ˜5-10 copies per chromosome for L. plantarum NC7. A P30 synthetic promoter was derived from L. plantarum rRNA promoters that are known to be among the strongest promoters in lactic acid bacteria (LAB) [Rud et al., Microbiology (2005) 152:1011-1019].

[0121] The L. lactis suf operon (6,108 bp) was PCR-amplified from genomic DNA of L. lactis subsp lactis NCDO2118 (NCIMB 702118) with T-sufLI(NotI) (SEQ ID NO:572) and B-sufLI(SpeI) (SEQ ID NO:573) primers. L. lactis subsp lactis NCDO2118 genomic DNA was prepared with a Puregene Gentra Kit (QIAGEN, CA). The resulting suf PCR fragment containing ysfB (sufC), ysfB (sufC), ysfA (sufD), yseI (sufS), yseH, nifU, and yseF (sufB) coding regions was digested with NotI and SpeI, and the 6.1 Kbp suf operon fragment was gel-purified. A cloning plasmid pTnCm (SEQ ID NO:574) was digested with NotI and SpeI, and ligated with 6.1 Kbp suf operon fragment. pTnCm contains a pE194 replicon, pBR322 replicon, ampicillin resistance marker for selection in E. coli, and chloramphenicol resistance marker for selection in L. plantarum. The ligation mixture was transformed into the E. coli Top10 strain (Invitrogen, CA), and spread on LB plates containing 100 μg/ml ampicillin for selection. Positive clones were screened by XhoI digestion, giving two fragments with an expected size of 5,136 bp and 8,413 bp. The correct plasmid was named pTnCm-suf(L. lactis).

[0122] The L. lactis ilvD coding region was PCR-amplified from genomic DNA of L. lactis subsp lactis NCDO2118 (NCIMB 702118) with T-ilvDLI(BamHI) (SEQ ID NO:575) and B-ilvDLI(NotIBamHI) (SEQ ID NO:576) primers. The resulting ilvD PCR fragment was digested with BamHI and NotI, This 1.7 Kbp ilvD coding region fragment was gel-purified, and ligated into BamHI and NotI sites of plasmid pAMAC8-Papha (SEQ ID NO:577), which contained the Papha promoter from the pJH1 plasmid of Enterococcus faecalis (Trieu-Cuot, P. & Courvalin, P. Gene (1983) 23:331-341). pAMAC8 carries a pAMβ31 replication origin (Renault et al., Gene 183:175-182 (1996); and O'Sullivan et al., Gene 137:227-231 (1993)), P15A replicon from pACYC184, chloramphenicol resistance gene from Staphylococcus aureus plasmid pC194 for selection in L. plantarum, and ampicillin gene for selection in E. coli. As a result of the ligation, pAMAC8-Papha-ilvD (L.lactis) was generated. Plasmid pAMAC8-Papha-ilvD(L. lactis) was then digested with XhoI and NotI, and the 2,147 by Papha-ilvDLI fragment was gel-purified. The 2,147 by Papha-ilvDLI fragment was ligated into SalI and NotI sites of pTnCm-suf(L. lactis). The ligation mixture was transformed into E. coli Top10 cells (Invitrogen, CA), which were spread on LB plates containing 100 μg/ml ampicillin for selection. Positive clones were screened by BamHI and NotI digestion, giving two fragments with an expected size of 13,934 by and 1,742 bp. The correct plasmid was named pTnCm-Papha-ilvD(L. lactis)-suf(L. lactis).

[0123] The ilvD(L. lactis)-suf(L. lactis) cassette (SEQ ID NO:594) was isolated from pTnCm-Papha-ilvD(L. lactis)-suf(L. actis). Plasmid pTnCm-Papha-ilvD(L. lactis)-suf(L. lactis) was digested with SpeI, treated with Klenow fragment of DNA polymerase to make blunt ends, and then digested with BamHI. The 7.9 Kbp ilvD(L. lactis)-suf(L. lactis) cassette (SEQ ID NO: 594) was gel-purified, and ligated into BamHI and SmaI sites of pDM1 to clone the ilvD(L. lactis)-suf(L. lactis) cassette under the control of the P30 promoter in pDM1. The ligation mixture was transformed into E. coli Top10 cells (Invitrogen, CA), and spread on LB plates containing 25 μg/ml chloramphenicol for selection. Positive clones were screened by ApaLI digestion, giving two fragments with an expected size of 8,040 bp and 3,562 bp. The correct plasmid was named pDM1-ilvD(L. lactis)-suf(L. lactis). The sequence of the ilvD(L. lactis)-suf(L. lactis) cassette in pDM1-ilvD(L. lactis)-suf(L. lactis) was confirmed with sequence primers, DLI1(R) (SEQ ID NO:578), DLI2 (SEQ ID NO:579), DLI3 (SEQ ID NO:580), Suf1 (SEQ ID NO:581), Suf2 (SEQ ID NO:582), Suf3 (SEQ ID NO:583), Suf4 (SEQ ID NO:584), Suf5 (SEQ ID NO:585), Suf6 (SEQ ID NO:586), Suf7 (SEQ ID NO:587), and Suf8 (SEQ ID NO:588).

[0124] Plasmid pDM1-ilvD(L.lactis)-suf(L.lactis) was digested with ApaLI and NotI, treated with Klenow fragment of DNA polymerase to make blunt ends, and the 5.3 Kbp fragment containing pDM1-ilvD(L. lactis) was gel-purified. The gel-purified pDM1-ilvDLI fragment was self-ligated to create pDM1-ilvD(L. lactis). Positive clones were screened by SalI digestion, giving one fragment with an expected size of 5,262 bp.

### Example 3

### Recombinant Co-Expression of Lactococcus lactis suf Operon with Lactococcus lactis ilvD Restores DHAD Activity in Lactobacillus plantarum PN0512Δsuf Strain

[0125] The purpose of this example is to describe co-expression of the Lactococcus lactis ilvD coding region and Lactococcus lactis suf operon in the Lactobacillus plantarum PN0512 Δsuf strain. Construction of Lactobacillus plantarum PN0512 Δsuf operon deletion mutant and that of plasmids pDM1-ilvD(L. lactis)-suf(L. lactis) and pDM1-ilvD(L. lactis) are described in examples 1 and 2, respectively.

[0126] L. plantarum PN0512 was transformed with plasmid pDM1-ilvD(L. lactis)-suf(L. lactis) or pDM1-ilvD(L. lactis) by electroporation. Electro-competent cells were prepared by the following procedure. 5 ml of Lactobacilli MRS medium containing 1% glycine was inoculated with PN0512 cells and grown overnight at 30° C. 100 ml MRS medium with 1% glycine was inoculated with the overnight culture to an OD600=0.1 and grown to an OD600=0.7 at 30° C. Cells were harvested at 3700×g for 8 min at 4° C., washed with 100 ml cold 1 mM MgCl₂, centrifuged at 3700×g for 8 min at 4° C., washed with 100 ml cold 30% PEG-1000 (81188, Sigma-Aldrich, St. Louis, Mo.), recentrifuged at 3700×g for 20 min at 4° C., and then resuspended in 1 ml cold 30% PEG-1000. 60 μl of electro-competent cells were mixed with ˜100 ng plasmid DNA in a cold 1 mm gap electroporation cuvette and electroporated in a BioRad Gene Pulser (Hercules, Calif.) at 1.7 kV, 25 μF, and 400Ω. Cells were resuspended in 1 ml MRS medium containing 500 mM sucrose and 100 mM MgCl₂, incubated at 30° C. for 2 hrs, and then plated on MRS medium plates containing 10 μg/ml of chloramphenicol for selection.

[0127] Lactobacilli MRS medium (7406, Accumedia, Neogen Corporation, Lansing, Mich.)) was inoculated with L. plantarum PN0512 Δsuf transformants carrying pDM1-ilvD(L.lactis)-suf(L.lactis) or pDM1-ilvD(L.lactis) and grown overnight at 30° C. 120 ml MRS medium with 40 μM ferric citrate (F3388, Sigma-Aldrich, St. Louis, Mo.), 0.5 mM L-cysteine (30089, Sigma-Aldrich, St. Louis, Mo.), and 10 μg/ml chloramphenicol was inoculated with overnight culture to an OD600 of 0.1 and grown to an OD600 of 2-3 anaerobically at 30° C. in a 50 ml conical tube. Cultures were centrifuged at 3700×g for 10 min at 4° C., the pellets washed with 50 mM potassium phosphate buffer pH 6.2 (6.2 g/L KH₂PO₄ and 1.2 g/L K₂HPO₄) and re-centrifuged. Pellets were frozen and stored at −80° C. until assayed for DHAD activity. Cell extract samples were assayed for DHAD activity using a dinitrophenylhydrazine based method as follows. Enzymatic activity of the crude extract was assayed at 37° C. as follows. Cells to be assayed for DHAD were suspended in 2-5 volumes of 50 mM Tris, 10 mM MgSO₄, pH 8.0 (TM8) buffer, then broken by sonication at 0° C. The crude extract from the broken cells was centrifuged to pellet the cell debris. The supernatants were removed and stored on ice until assayed (initial assay was within 2 hrs of breaking the cells). It was found that the DHADs assayed herein were stable in crude extracts kept on ice for a few hours. The activity was also preserved when small samples were frozen in liquid N₂ and stored at −80° C.

[0128] The supernatants were assayed using the reagent 2,4-dinitrophenyl hydrazine as described in Flint and Emptage (J. Biol. Chem. (1988) 263: 3558-64). When the activity was so high that it became necessary to dilute the crude extract to obtain an accurate assay, the dilution was done in 5 mg/ml BSA in TM8.

[0129] Protein assays were performed using the Piece Better Bradford reagent (cat #23238) using BSA as a standard. Dilutions for protein assays were made in TM8 buffer when necessary.

[0130] The DHAD activity results are given in Table 8. Plasmid expression of the L. lactis ilvD coding region showed 0.004 μmol min⁻¹ mg⁻¹ DHAD activity in L. plantarum PN0512. Plasmid expression of the L. lactis ilvD coding region, however, showed no DHAD activity in L. plantarum PN0512 Δsuf. Co-expression in L.plantarum PN0512 Δsuf of L. lactis suf operon with L. lactis ilvD from pDM1-ilvD(L.lactis)-suf(L.lactis) restored the DHAD activity to 0.004 μmol min⁻¹ mg⁻¹. The data indicate that either L. plantarum native suf operon or L. lactis suf operon is involved in Fe—S cluster biogenesis for DHAD activity in L. plantarum PN0512.

TABLE 8
DHAD activity in L. plantarum PN0512 Δsuf.

| | Specific Activity |
|---|---|
| Strain/Plasmid | (μmol min⁻¹ mg⁻¹) |
| L. plantarum PN0512/pDMI-ilvD(L. lactis) | 0.004 |
| L. plantarum PN0512 Δsuf/pDM1-ilvD(L. lactis) | 0.000 |
| L. plantarum PN0512 Δsuf/pDM1-ilvD(L. lactis)- | 0.004 |
| suf(L. lactis) | |

### Example 4

### Construction of Plasmids for Co-Expression of Lactococcus lactis ilvD and the Lactobacillus plantarum PN0512 suf Operon

[0131] The purpose of this example is to describe the construction of plasmids used for the co-expression of Lactococcus lactis ilvD (SEQ ID NO:231) and the Lactobacillus plantarum PN0512 suf operon (SEQ ID NO:589). A shuttle vector pDM1 (SEQ ID NO:571), described in Example 2, was used for cloning and expression of the ilvD coding region from Lactococcus lactis subsp lactis NCDO2118 (NCIMB 702118) [Godon et al., J. Bacteriol. (1992) 174:6580-6589] and the suf operon from Lactobacillus plantarum PN0512.

[0132] Plasmids were constructed using standard molecular biology methods known in the art. All restriction and modifying enzymes and Phusion High-Fidelity PCR Master Mix were purchased from New England Biolabs (Ipswich, Mass.). DNA fragments were purified with Qiaquick PCR Purification Kit (Qiagen Inc., Valencia, Calif.). Plasmid DNA was prepared with QIAprep Spin Miniprep Kit (Qiagen Inc., Valencia, Calif.). L. plantarum PN0512 genomic DNA was prepared with MasterPure DNA Purification Kit (Epicentre, Madison, Wis.). Oligoucleotides were synthesized by Sigma-Genosys (Woodlands, Tex.). All vector constructs were confirmed by DNA sequencing.

[0133] Vector pDM1 was modified by deleting nucleotides 3281-3646 spanning the lacZ region which were replaced with a multi cloning site. Primers oBP120 [SEQ ID NO:562], containing an XhoI site, and oBP182 [SEQ ID NO:563], containing DrdI, PstI, HindIII, and BamHI sites, were used to amplify the P30 promoter from pDM1 with Phusion High-Fidelity PCR Master Mix. The resulting PCR product and pDM1 vector were digested with XhoI and DrdI, which drops out lacZ and P30. The PCR product and the large fragment of the pDM1 digestion were ligated to yield vector pDM20 in which the P30 promoter was reinserted, bounded by XhoI and DrdI restriction sites.

[0134] The ilvD coding region (SEQ ID NO:231) from Lactococcus lactis and a ribosome binding sequence (SEQ ID NO:590) were cloned into pDM20 to create vector pDM20-ilvD(L. lactis). Primers oBP190 (SEQ ID NO:564), containing a BamHI site and ribosome binding sequence, and oBP192 (SEQ ID NO:565), containing a PstI site, were used to amplify the ilvD coding region from pDM1-ilvD(L. lactis) with Phusion High-Fidelity PCR Master Mix. Construction of pDM1-ilvD(L.lactis) is described in Example 2. The resulting PCR product and pDM20 were ligated after digestion with BamHI and PstI to yield vector pDM20-ilvD(L.lactis) in which the ilvD coding region is expressed from the P30 promoter.

[0135] The promoter region of the IdhL1 gene (SEQ ID NO:591) from Lactobacillus plantarum PN0512 with a multi cloning site and the suf operon containing sufC, sufD, sufS, sufU, and sufB (SEQ ID NO:589) from Lactobacillus plantarum PN0512 were cloned into pDM20-ilvD(LI) by two consecutive steps to create vector pDM20-ilvD(LI)-PldhL1-suf(Lp)]. sufC was preceded by a ribosome binding sequence (SEQ ID NO:590). Primers AA178 (SEQ ID NO567), containing DrdI, SalI and AflII sites, and AA179 (SEQ ID NO:568), containing DrdI, PmeI, SacI, AvrII, PacI, KasI, and Not I sites, were used to amplify the IdhL1 promoter from L. plantarum PN0512 genomic DNA using Phusion High-Fidelity PCR Master Mix. The resulting PCR product and pDM20-ilvD(LI) were ligated after digestion with DrdI. Clones were screened by PCR for inserts that were in the same orientation as the ilvD coding region using primers AA178 (SEQ ID NO:567) and AA177 (SEQ ID NO:566). A clone that had the correctly oriented insert was named pDM20-ilvD(LI)-PldhL1. Primers oBP211 (SEQ ID NO:569), containing a NotI site and ribosome binding sequence, and oBP195 (SEQ ID NO:570), containing a PacI site, were used to amplify the suf operon from L. plantarum PN0512 genomic DNA using Phusion High-Fidelity PCR Master Mix. The resulting PCR product and pDM20-ilvD(LI)-PldhL1 were ligated after digestion with NotI and PacI to yield vector pDM20-ilvD(LI)-PldhL1-suf(Lp), where the suf operon is expressed from the IdhL1 promoter.

### Example 5

### Increased DHAD Activity with Co-Expression of Lactococcus lactis ilvD and the Lactobacillus plantarum PN0512 suf Operon in a Wild-Type PN0512 Strain Background

[0136] The purpose of this example is to demonstrate the effect of co-expression of the Lactobacillus plantarum PN0512 suf operon, containing the Fe—S cluster assembly genes, with Lactococcus lactis ilvD on DHAD activity in wild-type Lactobacillus plantarum PN0512.

[0137] Lactobacillus plantarum PN0512 was transformed separately with vectors pDM20-ilvD(LI) and pDM20-ilvD(LI)-PldhL1-suf(Lp). Lactobacillus plantarum PN0512 was transformed as in Example 1, except transformants were selected for on MRS medium plates containing 10 pg/ml of chloramphenicol (CO378, Sigma-Aldrich, St. Louis, Mo.). Strains PN0512/pDM20-ilvD(LI) and PN0512/pDM20-ilvD(LI)-PldhL1-suf(Lp) were grown overnight in Lactobacilli MRS medium (7406, Accumedia, Neogen Corporation, Lansing, Mich.) with 10 μg/ml chloramphenicol (C0378, Sigma-Aldrich, St. Louis, Mo.) at 30° C. 120 ml of MRS medium supplemented with 100 mM MOPS (M1254, Sigma-Aldrich, St. Louis, Mo.), 40 μM ferric citrate (F3388, Sigma-Aldrich, St. Louis, Mo.), 0.5 mM L-cysteine (30089, Sigma-Aldrich, St. Louis, Mo.), and 10 μg/ml chloramphenicol adjusted to pH 7.5 with KOH was inoculated with overnight culture to an OD600˜0.05-0.1 in a 125 ml screw cap flask. The cultures were placed in an anaerobic chamber (Coy Laboratories Inc., Grass Lake, Mich.) for 1 hour with the caps loose or the cultures were inoculated in the anaerobic chamber using medium which had been stored in the anaerobic chamber. The caps on the flask were sealed tight and the cultures were incubated at 37° C. until reaching an OD600˜1.0-2.0. Cultures were centrifuged at 3700×g for 10 min at 4° C. Pellets were washed with 50 mM potassium phosphate buffer pH 6.2 (6.2 g/L KH₂PO₄ (P5379, Sigma-Aldrich, St. Louis, Mo.) and 1.2 g/L K₂HPO₄ (P8281, Sigma-Aldrich, St. Louis, Mo.)) and re-centrifuged. Pellets were frozen and stored at −80° C. until assayed for DHAD activity.

[0138] Samples were assayed for DHAD activity using a dinitrophenylhydrazine based method as described in Example 3. The DHAD activity results are given in Table 9. The presence of the overexpressed suf operon led to a two-fold increase in DHAD activity in the PN0512 strain background.

TABLE 9
Co-expression of ilvD and the suf operon in
wild-type Lactobacillus plantarum PN0512.

| Strain | DHAD Activity |
|---|---|
| PN0512/pDM20-ilvD(Ll) | 0.022 |
| PN0512/pDM20-ilvD(Ll)-Pldhl1-suf(Lp) | 0.051 |

DHAD activity in μmoles KIVA/min/mg total protein. Data represent the average of two independent experiments.

### Example 6 (Prophetic)

### Construction of Plasmid for Co-Expression of Bacillus subtilis ilvD and the Lactococcus lactis suf Operon

[0139] The purpose of this example is to describe how to clone the ilvD coding region (SEQ ID NO:497) from Bacillus subtilis 168 (ATCC 23857) and suf operon (SEQ ID NO:881) from Lactococcus lactis subsp lactis NCDO2118 (NCIMB 702118) [Godon et al., J. Bacteriol. (1992) 174:6580-6589] into pDM1.

[0140] Plasmid pDM1-ilvD(B. subtilis)-suf(L.lactis) is constructed by swapping the ilvD(L. lactis) coding region of pDM1-ilvD(B. subtilis)-suf(L.lactis) with a B. subtilis ilvD coding region. The B. subtilis ilvD coding region including a ribosomal binding site (RBS) is PCR-amplified from genomic DNA of Bacillus subtilis 168 with primers T-ilvDBs(BamHI) (SEQ ID NO:592) and B-ilvDBs(NotI) (SEQ ID NO:593). Bacillus subtilis 168 genomic DNA is prepared with a Puregene Gentra Kit (QIAGEN, CA). The B. subtilis ilvD PCR product is digested with BamHI and NotI, and the 1.7 kbp B. subtilis ilvD fragment is gel-purified. Plasmid pDM1-ilvD(L.lactis)-suf(L.lactis) is digested with BamHI and NotI, and 9.8 kbp fragment containing pDM1-suf(L.lactis) is gel-purified. The construction of pDM1-ilvD(L.lactis)-suf(L.lactis) is described in Example 2. The resulting 9.8 kbp pDM1-suf(L.lactis) fragment is ligated with the 1.7 kbp B. subtilis ilvD fragment. The ligation mixture is transformed into E. coli Top10 strain (Invitrogen, CA), and spread on LB plates containing 25 μg/ml chloramphenicol for selection. Positive clones are screened by colony PCR with primers T-ilvDBs(BamHI) and B-ilvDBs(NotI), giving a PCR product with an expected size of 1.7 kbp. The positive plasmid is named as pDM1-ilvD(B. subtilis)-suf(L.lactis). Plasmid pDM1-ilvD(B. subtilis)-suf(L.lactis) is digested with ApaLI and NotI, treated with Klenow fragment of DNA polymerase to make blunt ends, and then the 5.3 Kbp fragment containing pDM1-ilvD(B. subtilis) is gel-purified. The gel-purified fragment is self-ligated to create pDM1-ilvD(B. subtilis). Positive clones are screened by SalI digestion, giving one fragment with an expected size of 5.3 kbp.

### Example 7 (Prophetic)

### Co-Expression of Bacillus subtilis ilvD with Lactococcus lactis suf Operon in Lactobacillus plantarum PN0512

[0141] The purpose of this example is to describe how to express Bacillus subtilis ilvD with Lactococcus lactis suf operon in Lactobacillus plantarum PN0512.

[0142] L. plantarum PN0512 is transformed with plasmid pDM1-ilvD(B. subtilis)-suf(L.lactis) or pDM1-ilvD(B. subtilis) by electrophoration. Preparation of electro-competent cells and electro-transformation are performed as described in Example 1.

[0143] L. plantarum PN0512 transformants carrying pDM1-ilvD(B. subtilis)-suf(L.lactis) or pDM1-ilvD(B. subtilis) are grown overnight in Lactobacilli MRS medium at 30° C. 120 ml of MRS medium supplemented with 40 μM ferric citrate, 0.5 mM L-cysteine, and 10 μg/ml chloramphenicol is inoculated with overnight culture to an OD600=0.1 in a 50 ml conical tube for each overnight sample. Cultures are anaerobically incubated at 30° C. until reaching an OD600 of 2-3. Cultures are centrifuged at 3700×g for 10 min at 4° C. Pellets are washed with 50 mM potassium phosphate buffer pH 6.2 (6.2 g/L KH₂PO₄ and 1.2 g/L K₂HPO₄) and re-centrifuged. Pellets are frozen and stored at −80° C. until assayed for DHAD activity. Cell extract samples are assayed for DHAD activity using a dinitrophenylhydrazine based method as in Example 3. In preferred embodiments, DHAD activity is higher in the cells transformed with pDM1-ilvD(B. subtilis)-suf(L.lactis) than in those transformed with pDM1-ilvD(B. subtilis).

TABLE 7

| | A | C | D | E | F | G | H | I | K | | | | | | | | | | | | Position in |
|---|---|---|---|---|---|---|---|---|---|---|---|---|---|---|---|---|---|---|---|---|---|
| HMM | m->m | m->i | m->d | i->m | i->i | d->m | d->d | b->m | m->e | L | M | N | P | Q | R | S | T | V | W | Y | alignment |
| | −538 | * | −1684 | | | | | | | | | | | | | | | | | | |
| 1(M) | −233 | −1296 | 99 | 1223 | −1477 | −1132 | 89 | −1122 | 420 | −1248 | 1757 | 1553 | −1296 | 464 | −24 | −190 | −188 | −838 | −1578 | −985 | 6 |
| — | −149 | −500 | 233 | 43 | −381 | 399 | 106 | −626 | 210 | −466 | −720 | 275 | 394 | 45 | 96 | 359 | 117 | −369 | −294 | −249 | |
| — | −29 | −6203 | −7245 | −894 | −1115 | −701 | −1378 | −538 | * | | | | | | | | | | | | |
| 2(E) | −220 | −1288 | 232 | 1356 | −1807 | 1016 | −70 | −1474 | 190 | −1584 | −775 | 132 | −1298 | 300 | −282 | −183 | 1140 | −1092 | −1872 | −1262 | 7 |
| — | −149 | −500 | 233 | 43 | −381 | 399 | 106 | −626 | 210 | −466 | −720 | 275 | 394 | 45 | 96 | 359 | 117 | −369 | −294 | −249 | |
| — | −29 | −6203 | −7245 | −894 | −1115 | −701 | −1378 | * | * | | | | | | | | | | | | |
| 3(K) | −448 | −1932 | 1558 | 658 | −2220 | −1048 | 40 | −1983 | 1569 | −1938 | −1091 | 1558 | −1319 | 450 | −193 | −278 | −419 | −1552 | −2121 | −1397 | 8 |
| — | −149 | −500 | 233 | 43 | −381 | 399 | 106 | −626 | 210 | −466 | −720 | 275 | 394 | 45 | 96 | 359 | 117 | −369 | −294 | −249 | |
| — | −29 | −6203 | −7245 | −894 | −1115 | −701 | −1378 | * | * | | | | | | | | | | | | |
| 4(V) | −404 | −498 | −1497 | −939 | −588 | −1810 | −640 | 1591 | 914 | −127 | 335 | −962 | −1866 | −562 | −767 | −868 | −357 | 1720 | −1169 | −763 | 9 |
| — | −149 | −500 | 233 | 43 | −381 | 399 | 106 | −626 | 210 | −466 | −720 | 275 | 394 | 45 | 96 | 359 | 117 | −369 | −294 | −249 | |
| — | −29 | −6203 | −7245 | −894 | −1115 | −701 | −1378 | * | * | | | | | | | | | | | | |
| 5(E) | −265 | −1340 | −52 | 1376 | −1572 | −1189 | 113 | −1125 | 1345 | −1287 | −496 | 99 | −1321 | 505 | 198 | −218 | −205 | 597 | −1598 | −1032 | 10 |
| — | −149 | −500 | 233 | 43 | −381 | 399 | 106 | −626 | 210 | −466 | −720 | 275 | 394 | 45 | 96 | 359 | 117 | −369 | −294 | −249 | |
| — | −29 | −6203 | −7245 | −894 | −1115 | −701 | −1378 | * | * | | | | | | | | | | | | |
| 6(S) | 256 | −397 | −1014 | −830 | −1841 | −646 | −862 | −1443 | −767 | −1740 | −963 | −568 | −1249 | −651 | −1007 | 2267 | 1586 | −862 | −2080 | −1672 | 11 |
| — | −149 | −500 | 233 | 43 | −381 | 399 | 106 | −626 | 210 | −466 | −720 | 275 | 394 | 45 | 96 | 359 | 117 | −369 | −294 | −249 | |
| — | −29 | −6203 | −7245 | −894 | −1115 | −701 | −1378 | * | * | | | | | | | | | | | | |
| 7(M) | −990 | −889 | −2630 | 157 | −513 | −2514 | −1346 | 1309 | −1767 | 820 | 3683 | −1898 | −2491 | −1496 | −1799 | −1589 | −925 | 150 | −1336 | −1041 | 12 |
| — | −149 | −500 | 233 | 43 | −381 | 399 | 106 | −626 | 210 | −466 | −720 | 275 | 394 | 45 | 96 | 359 | 117 | −369 | −294 | −249 | |
| — | −16 | −7108 | −8150 | −894 | −1115 | −701 | −1378 | * | * | | | | | | | | | | | | |
| 8(E) | 588 | −1875 | −194 | 1536 | −2188 | −1373 | −59 | −1931 | 957 | −1890 | −977 | 904 | 292 | 393 | −162 | 483 | −372 | −1495 | −2070 | −1391 | 13 |
| — | −149 | −500 | 233 | 43 | −381 | 399 | 106 | −626 | 210 | −466 | −720 | 275 | 394 | 45 | 96 | 359 | 117 | −369 | −294 | −249 | |
| — | −16 | −7108 | −8150 | −894 | −1115 | −701 | −1378 | * | * | | | | | | | | | | | | |
| 9(N) | −514 | −1116 | 1207 | −315 | 447 | −1650 | −304 | −778 | −224 | 825 | −277 | 1457 | −1738 | −123 | −618 | −627 | −454 | −603 | −1186 | 763 | 14 |
| — | −149 | −500 | 233 | 43 | −381 | 399 | 106 | −626 | 210 | −466 | −720 | 275 | 394 | 45 | 96 | 359 | 117 | −369 | −294 | −249 | |
| — | −16 | −7108 | −8150 | −894 | −1115 | −701 | −1378 | * | * | | | | | | | | | | | | |
| 10(N) | −815 | −1190 | −1360 | −922 | −904 | −1967 | −797 | −442 | −670 | 381 | 1700 | 3009 | −2099 | −654 | −934 | −1051 | −791 | −445 | −1490 | −979 | 15 |
| — | −149 | −500 | 233 | 43 | −381 | 399 | 106 | −626 | 210 | −466 | −720 | 275 | 394 | 45 | 96 | 359 | 117 | −369 | −294 | −249 | |
| — | −16 | −7108 | −8150 | −894 | −1115 | −701 | −1378 | * | * | | | | | | | | | | | | |
| 11(K) | −1530 | −2498 | −1722 | −855 | −3141 | −2246 | −428 | −2627 | 2828 | −2404 | −1656 | −927 | 662 | −2 | 2047 | −1421 | −1337 | −2324 | −2357 | −2081 | 16 |
| — | −149 | −500 | 233 | 43 | −381 | 399 | 106 | −626 | 210 | −466 | −720 | 275 | 394 | 45 | 96 | 359 | 117 | −369 | −294 | −249 | |
| — | −16 | −7108 | −8150 | −894 | −1115 | −701 | −1378 | * | * | | | | | | | | | | | | |
| 12(Y) | −872 | −1887 | −861 | −290 | −1369 | −1801 | 1662 | −1797 | 325 | −1793 | −1031 | 893 | −1876 | 56 | 2219 | −812 | −780 | −1514 | −1565 | 2287 | 17 |
| — | −149 | −500 | 233 | 43 | −381 | 399 | 106 | −626 | 210 | −466 | −720 | 275 | 394 | 45 | 96 | 359 | 117 | −369 | −294 | −249 | |
| — | −16 | −7108 | −8150 | −894 | −1115 | −701 | −1378 | * | * | | | | | | | | | | | | |
| 13(S) | −830 | −1586 | −1471 | −1099 | −2717 | −1642 | −1010 | −2479 | −266 | −2518 | −1746 | −1065 | −2069 | −676 | 1822 | 2748 | −1000 | −1950 | −2597 | −2189 | 18 |
| — | −149 | −500 | 233 | 43 | −381 | 399 | 106 | −626 | 210 | −466 | −720 | 275 | 394 | 45 | 96 | 359 | 117 | −369 | −294 | −249 | |
| — | −16 | −7108 | −8150 | −894 | −1115 | −701 | −1378 | * | * | | | | | | | | | | | | |
| 14(Q) | −851 | −2131 | −775 | −153 | −2554 | −1735 | −211 | −2205 | 1908 | −2094 | −1244 | −386 | −1802 | 2254 | 974 | 1001 | −747 | −1819 | −2181 | −1667 | 19 |
| — | −149 | −500 | 233 | 43 | −381 | 399 | 106 | −626 | 210 | −466 | −720 | 275 | 394 | 45 | 96 | 359 | 117 | −369 | −294 | −249 | |
| — | −16 | −7108 | −8150 | −894 | −1115 | −701 | −1378 | * | * | | | | | | | | | | | | |
| 15(T) | −405 | −1258 | −618 | −100 | −1490 | −1466 | 1158 | −1121 | 1 | −1299 | −514 | 578 | −1607 | 65 | −433 | 960 | 1849 | 343 | −1677 | −1143 | 20 |
| — | −149 | −500 | 233 | 43 | −381 | 399 | 106 | −626 | 210 | −466 | −720 | 275 | 394 | 45 | 96 | 359 | 117 | −369 | −294 | −249 | |
| — | −16 | −7108 | −8150 | −894 | −1115 | −701 | −1378 | * | * | | | | | | | | | | | | |
| 16(I) | −1772 | −1325 | −4307 | −3877 | −1405 | −3993 | −3383 | 2935 | −3705 | 820 | −217 | −3632 | −3761 | −3400 | −3682 | −3260 | −1742 | 2033 | −2838 | −2525 | 21 |
| — | −149 | −500 | 233 | 43 | −381 | 399 | 106 | −626 | 210 | −466 | −720 | 275 | 394 | 45 | 96 | 359 | 117 | −369 | −294 | −249 | |
| — | −16 | −7108 | −8150 | −894 | −1115 | −701 | −1378 | * | * | | | | | | | | | | | | |
| 17(T) | −1018 | −1329 | −2004 | −1771 | −409 | −1993 | −1000 | −1256 | −1512 | −1464 | −966 | −1543 | −2367 | −1428 | −1638 | −1257 | 3050 | −1090 | −1012 | 2448 | 22 |
| — | −149 | −500 | 233 | 43 | −381 | 399 | 106 | −626 | 210 | −466 | −720 | 275 | 394 | 45 | 96 | 359 | 117 | −369 | −294 | −249 | |
| — | −16 | −7108 | −8150 | −894 | −1115 | −701 | −1378 | * | * | | | | | | | | | | | | |
| 18(Q) | −1509 | −3056 | 1970 | 44 | −3310 | −1666 | −896 | −3242 | −877 | −3158 | −2439 | −322 | −2123 | 3562 | −1493 | −1259 | −1550 | −2779 | −3260 | −2446 | 23 |
| — | −149 | −500 | 233 | 43 | −381 | 399 | 106 | −626 | 210 | −466 | −720 | 275 | 394 | 45 | 96 | 359 | 117 | −369 | −294 | −249 | |
| — | −16 | −7108 | −8150 | −894 | −1115 | −701 | −1378 | * | * | | | | | | | | | | | | |
| 19(D) | −1006 | −2199 | 2178 | −88 | −3159 | 1997 | −936 | −2974 | −948 | −2977 | −2174 | −382 | −1960 | −589 | −1571 | 1295 | −1157 | −2369 | −3178 | −2430 | 24 |
| — | −149 | −500 | 233 | 43 | −381 | 399 | 106 | −626 | 210 | −466 | −720 | 275 | 394 | 45 | 96 | 359 | 117 | −369 | −294 | −249 | |
| — | −16 | −7108 | −8150 | −894 | −1115 | −701 | −1378 | * | * | | | | | | | | | | | | |
| 20(M) | 445 | −796 | −1082 | −521 | −841 | −1643 | −412 | −403 | −370 | −692 | 2213 | −646 | 536 | 1166 | −698 | −630 | 660 | 831 | −1204 | −767 | 25 |
| — | −149 | −500 | 233 | 43 | −381 | 399 | 106 | −626 | 210 | −466 | −720 | 275 | 394 | 45 | 96 | 359 | 117 | −369 | −294 | −249 | |
| — | −16 | −7108 | −8150 | −894 | −1115 | −701 | −1378 | * | * | | | | | | | | | | | | |
| 21(Q) | 741 | −990 | −1025 | −507 | −1249 | −1551 | −519 | −720 | −357 | −1062 | −345 | −635 | −1739 | 1770 | −713 | −589 | 1576 | 1129 | −1559 | −1097 | 26 |
| — | −149 | −500 | 233 | 43 | −381 | 399 | 106 | −626 | 210 | −466 | −720 | 275 | 394 | 45 | 96 | 359 | 117 | −369 | −294 | −249 | |
| — | −16 | −7108 | −8150 | −894 | −1115 | −701 | −1378 | * | * | | | | | | | | | | | | |
| 22(R) | −1753 | −2648 | −2072 | −1047 | −3365 | −2405 | −452 | −2782 | 1989 | −2495 | −1773 | −1062 | −2379 | 2402 | 2643 | −1629 | −1506 | −2504 | −2397 | −2190 | 27 |
| — | −149 | −500 | 233 | 43 | −381 | 399 | 106 | −626 | 210 | −466 | −720 | 275 | 394 | 45 | 96 | 359 | 117 | −369 | −294 | −249 | |
| — | −16 | −7108 | −8150 | −894 | −1115 | −701 | −1378 | * | * | | | | | | | | | | | | |
| 23(S) | −330 | −1010 | −1820 | −1628 | −2778 | −1229 | −1652 | −2481 | −1592 | −2691 | −1841 | −1273 | 2130 | −1426 | −1834 | 2449 | 1034 | −1716 | −2961 | −2594 | 28 |
| — | −149 | −500 | 233 | 43 | −381 | 399 | 106 | −626 | 210 | −466 | −720 | 275 | 394 | 45 | 96 | 359 | 117 | −369 | −294 | −249 | |
| — | −16 | −7108 | −8150 | −894 | −1115 | −701 | −1378 | * | * | | | | | | | | | | | | |
| 24(P) | 1882 | −1119 | −2231 | −2302 | −3062 | −1360 | −2209 | −2710 | −2339 | −3013 | −2243 | −1676 | 3304 | −2117 | −2409 | −742 | −918 | −1916 | −3263 | −3022 | 29 |
| — | −149 | −500 | 233 | 43 | −381 | 399 | 106 | −626 | 210 | −466 | −720 | 275 | 394 | 45 | 96 | 359 | 117 | −369 | −294 | −249 | |
| — | −16 | −7108 | −8150 | −894 | −1115 | −701 | −1378 | * | * | | | | | | | | | | | | |
| 25(N) | 969 | −1230 | −1066 | −915 | −2593 | −1313 | −1196 | −2242 | −1033 | −2447 | −1626 | 3197 | −1850 | −898 | −1392 | −582 | 1155 | −1644 | −2736 | −2256 | 30 |
| — | −149 | −500 | 233 | 43 | −381 | 399 | 106 | −626 | 210 | −466 | −720 | 275 | 394 | 45 | 96 | 359 | 117 | −369 | −294 | −249 | |
| — | −16 | −7108 | −8150 | −894 | −1115 | −701 | −1378 | * | * | | | | | | | | | | | | |
| 26(R) | −1847 | −2640 | −2014 | −1161 | −3282 | −2428 | −579 | −2818 | 687 | −2553 | −1869 | −1165 | −2462 | 2447 | 3181 | −1746 | −1630 | −2555 | −2447 | −2228 | 31 |
| — | −149 | −500 | 233 | 43 | −381 | 399 | 106 | −626 | 210 | −466 | −720 | 275 | 394 | 45 | 96 | 359 | 117 | −369 | −294 | −249 | |
| — | −16 | −7108 | −8150 | −894 | −1115 | −701 | −1378 | * | * | | | | | | | | | | | | |
| 27(A) | 3048 | −932 | −2480 | −2533 | −3075 | −1200 | −2274 | −2765 | −2501 | −3071 | −2221 | −1658 | −1948 | −2205 | −2512 | 1225 | −739 | −1842 | −3322 | −3078 | 32 |
| — | −149 | −500 | 233 | 43 | −381 | 399 | 106 | −626 | 210 | −466 | −720 | 275 | 394 | 45 | 96 | 359 | 117 | −369 | −294 | −249 | |
| — | −16 | −7108 | −8150 | −894 | −1115 | −701 | −1378 | * | * | | | | | | | | | | | | |
| 28(M) | −2406 | −2296 | −3638 | −3594 | −1525 | −3105 | −2824 | −1047 | −3121 | −596 | 5043 | −3293 | −3425 | −3046 | −2996 | −2911 | −2552 | −1398 | −2513 | −2207 | 33 |
| — | −149 | −500 | 233 | 43 | −381 | 399 | 106 | −626 | 210 | −466 | −720 | 275 | 394 | 45 | 96 | 359 | 117 | −369 | −294 | −249 | |
| — | −16 | −7108 | −8150 | −894 | −1115 | −701 | −1378 | * | * | | | | | | | | | | | | |
| 29(Y) | −1674 | −1506 | −2863 | −2464 | 596 | −2872 | 2251 | −972 | −2024 | 2197 | −552 | −1986 | −2876 | −1739 | −1988 | −1987 | −1601 | −1002 | −95 | 2332 | 34 |
| — | −149 | −500 | 233 | 43 | −381 | 399 | 106 | −626 | 210 | −466 | −720 | 275 | 394 | 45 | 96 | 359 | 117 | −369 | −294 | −249 | |
| — | −16 | −7108 | −8150 | −894 | −1115 | −701 | −1378 | * | * | | | | | | | | | | | | |
| 30(Y) | −2013 | −2305 | −2428 | −1781 | −328 | −2709 | −654 | −2240 | −258 | −2064 | −1626 | −1631 | −2788 | −899 | 2789 | −2017 | −1896 | −2130 | −857 | 3434 | 35 |
| — | −149 | −500 | 233 | 43 | −381 | 399 | 106 | −626 | 210 | −466 | −720 | 275 | 394 | 45 | 96 | 359 | 117 | −369 | −294 | −249 | |
| — | −16 | −7108 | −8150 | −894 | −1115 | −701 | −1378 | * | * | | | | | | | | | | | | |
| 31(A) | 2822 | −1031 | −2418 | −2539 | −3226 | 1898 | −2364 | −2941 | −2626 | −3229 | −2379 | −1722 | −2026 | −2302 | −2634 | −654 | −848 | −1983 | −3415 | −3226 | 36 |
| — | −149 | −500 | 233 | 43 | −381 | 399 | 106 | −626 | 210 | −466 | −720 | 275 | 394 | 45 | 96 | 359 | 117 | −369 | −294 | −249 | |
| — | −16 | −7108 | −8150 | −894 | −1115 | −701 | −1378 | * | * | | | | | | | | | | | | |
| 32(I) | −1247 | −941 | −3569 | −3039 | −1082 | −3101 | −2185 | 2227 | −2763 | 766 | −76 | −2700 | −3050 | −2469 | −2697 | −2253 | 1322 | 1974 | −1988 | −1633 | 37 |
| — | −149 | −500 | 233 | 43 | −381 | 399 | 106 | −626 | 210 | −466 | −720 | 275 | 394 | 45 | 96 | 359 | 117 | −369 | −294 | −249 | |
| — | −16 | −7108 | −8150 | −894 | −1115 | −701 | −1378 | * | * | | | | | | | | | | | | |
| 33(G) | −2594 | −2690 | −3304 | −3623 | −4328 | 3747 | −3462 | −4761 | −3953 | −4671 | −4212 | −3320 | −3352 | −3748 | −3779 | −2839 | −2981 | −4004 | −3668 | −4222 | 38 |
| — | −149 | −500 | 233 | 43 | −381 | 399 | 106 | −626 | 210 | −466 | −720 | 275 | 394 | 45 | 96 | 359 | 117 | −369 | −294 | −249 | |
| — | −16 | −7108 | −8150 | −894 | −1115 | −701 | −1378 | * | * | | | | | | | | | | | | |
| 34(F) | −1511 | −1236 | −3511 | −3017 | 2747 | −2982 | −1069 | −260 | −2651 | 992 | 2737 | −2407 | −2904 | −2088 | −2418 | −2099 | −1434 | −489 | −537 | 2056 | 39 |
| — | −149 | −500 | 233 | 43 | −381 | 399 | 106 | −626 | 210 | −466 | −720 | 275 | 394 | 45 | 96 | 359 | 117 | −369 | −294 | −249 | |
| — | −16 | −7108 | −8150 | −894 | −1115 | −701 | −1378 | * | * | | | | | | | | | | | | |
| 35(Q) | −576 | −1869 | −401 | 92 | −2232 | 831 | −173 | −1930 | 1505 | −1913 | −1042 | −186 | −1620 | 1653 | −51 | −482 | 1346 | −1534 | −2098 | −1490 | 40 |
| — | −149 | −500 | 233 | 43 | −381 | 399 | 106 | −626 | 210 | −466 | −720 | 275 | 394 | 45 | 96 | 359 | 117 | −369 | −294 | −249 | |
| — | −16 | −7108 | −8150 | −894 | −1115 | −701 | −1378 | * | * | | | | | | | | | | | | |
| 36(D) | −1352 | −3066 | 3028 | 1349 | −3303 | −1566 | −724 | −3141 | 1155 | −3043 | −2267 | −165 | −1991 | −354 | −1350 | −1086 | −1368 | −2659 | −3221 | −2356 | 41 |
| — | −149 | −500 | 233 | 43 | −381 | 399 | 106 | −626 | 210 | −466 | −720 | 275 | 394 | 45 | 96 | 359 | 117 | −369 | −294 | −249 | |
| — | −16 | −7108 | −8150 | −894 | −1115 | −701 | −1378 | * | * | | | | | | | | | | | | |
| 37(E) | −1507 | −3288 | 2042 | 2762 | −3520 | 515 | −853 | −3401 | −981 | −3296 | −2566 | −182 | −2064 | −503 | −1753 | −1209 | −1553 | −2895 | −3486 | −2547 | 42 |
| — | −149 | −500 | 233 | 43 | −381 | 399 | 106 | −626 | 210 | −466 | −720 | 275 | 394 | 45 | 96 | 359 | 117 | −369 | −294 | −249 | |
| — | −16 | −7108 | −8150 | −894 | −1115 | −701 | −1378 | * | * | | | | | | | | | | | | |
| 38(D) | −1445 | −2778 | 3529 | −53 | −3524 | −1590 | −1129 | −3476 | −1367 | −3459 | −2774 | −396 | −2156 | −825 | −2122 | 554 | −1609 | −2880 | −3582 | −2717 | 43 |
| — | −149 | −500 | 233 | 43 | −381 | 399 | 106 | −626 | 210 | −466 | −720 | 275 | 394 | 45 | 96 | 359 | 117 | −369 | −294 | −249 | |
| — | −16 | −7108 | −8150 | −894 | −1115 | −701 | −1378 | * | * | | | | | | | | | | | | |
| 39(F) | −2658 | −2176 | −4213 | −4000 | 3815 | −3933 | −1352 | −531 | −3638 | 1121 | −19 | −3184 | −3709 | −2820 | −3296 | −3219 | −2579 | −1037 | −601 | 403 | 44 |
| — | −149 | −500 | 233 | 43 | −381 | 399 | 106 | −626 | 210 | −466 | −720 | 275 | 394 | 45 | 96 | 359 | 117 | −369 | −294 | −249 | |
| — | −16 | −7108 | −8150 | −894 | −1115 | −701 | −1378 | * | * | | | | | | | | | | | | |
| 40(D) | −684 | −2193 | 1738 | 1460 | −2494 | −1437 | −249 | −2257 | 1694 | −2199 | −1308 | −62 | −1637 | 185 | −450 | −531 | 633 | −1808 | −2374 | −1657 | 45 |
| — | −149 | −500 | 233 | 43 | −381 | 399 | 106 | −626 | 210 | −466 | −720 | 275 | 394 | 45 | 96 | 359 | 117 | −369 | −294 | −249 | |
| — | −16 | −7108 | −8150 | −894 | −1115 | −701 | −1378 | * | * | | | | | | | | | | | | |
| 41(K) | −2620 | −2961 | −2461 | −2046 | −3743 | −2791 | −1570 | −3603 | 3784 | −3387 | −2839 | −2048 | −3039 | −1260 | −465 | −2604 | −2536 | −3331 | −3001 | −2988 | 46 |
| — | −149 | −500 | 233 | 43 | −381 | 399 | 106 | −626 | 210 | −466 | −720 | 275 | 394 | 45 | 96 | 359 | 117 | −369 | −294 | −249 | |
| — | −16 | −7108 | −8150 | −894 | −1115 | −701 | −1378 | * | * | | | | | | | | | | | | |
| 42(P) | 1882 | −1119 | −2231 | −2302 | −3062 | −1360 | −2209 | −2710 | −2339 | −3013 | −2243 | −1676 | 3304 | −2117 | −2409 | −742 | −918 | −1916 | −3263 | −3022 | 47 |
| — | −149 | −500 | 233 | 43 | −381 | 399 | 106 | −626 | 210 | −466 | −720 | 275 | 394 | 45 | 96 | 359 | 117 | −369 | −294 | −249 | |
| — | −16 | −7108 | −8150 | −894 | −1115 | −701 | −1378 | * | * | | | | | | | | | | | | |
| 43(I) | −1006 | −992 | −2347 | −1784 | −650 | −2452 | −1256 | 2372 | −1386 | 77 | 2213 | −1720 | −2455 | 2030 | −1490 | −1528 | −946 | 106 | −1441 | −1111 | 48 |
| — | −149 | −500 | 233 | 43 | −381 | 399 | 106 | −626 | 210 | −466 | −720 | 275 | 394 | 45 | 96 | 359 | 117 | −369 | −294 | −249 | |
| — | −16 | −7108 | −8150 | −894 | −1115 | −701 | −1378 | * | * | | | | | | | | | | | | |
| 44(V) | −1771 | −1603 | −3750 | −3689 | −2037 | −3050 | −3231 | 403 | −3479 | −1154 | −1076 | −3246 | −3399 | −3383 | −3437 | −2628 | −1917 | 3536 | −3074 | −2677 | 49 |
| — | −149 | −500 | 233 | 43 | −381 | 399 | 106 | −626 | 210 | −466 | −720 | 275 | 394 | 45 | 96 | 359 | 117 | −369 | −294 | −249 | |
| — | −16 | −7108 | −8150 | −894 | −1115 | −701 | −1378 | * | * | | | | | | | | | | | | |
| 45(G) | −2594 | −2690 | −3304 | −3623 | −4328 | 3747 | −3462 | −4761 | −3953 | −4671 | −4212 | −3320 | −3352 | −3748 | −3779 | −2839 | −2981 | −4004 | −3668 | −4222 | 50 |
| — | −149 | −500 | 233 | 43 | −381 | 399 | 106 | −626 | 210 | −466 | −720 | 275 | 394 | 45 | 96 | 359 | 117 | −369 | −294 | −249 | |
| — | −16 | −7108 | −8150 | −894 | −1115 | −701 | −1378 | * | * | | | | | | | | | | | | |
| 46(I) | −1759 | −1303 | −4330 | −3968 | −1751 | −4051 | −3743 | 3027 | −3837 | −597 | −528 | −3729 | −3875 | −3688 | −3910 | −3369 | −1751 | 2438 | −3259 | −2819 | 51 |
| — | −149 | −500 | 233 | 43 | −381 | 399 | 106 | −626 | 210 | −466 | −720 | 275 | 394 | 45 | 96 | 359 | 117 | −369 | −294 | −249 | |
| — | −16 | −7108 | −8150 | −894 | −1115 | −701 | −1378 | * | * | | | | | | | | | | | | |
| 47(V) | 1736 | −1012 | −3546 | −3078 | −1377 | −3073 | −2434 | 2052 | −2843 | −608 | −331 | −2754 | −3122 | −2619 | −2855 | −2270 | −1277 | 2193 | −2333 | −1941 | 52 |
| — | −149 | −500 | 233 | 43 | −381 | 399 | 106 | −626 | 210 | −466 | −720 | 275 | 394 | 45 | 96 | 359 | 117 | −369 | −294 | −249 | |
| — | −16 | −7108 | −8150 | −894 | −1115 | −701 | −1378 | * | * | | | | | | | | | | | | |
| 48(N) | −686 | −1511 | −702 | −806 | −2927 | −1386 | −1339 | −2841 | −1264 | −2950 | −2137 | 2702 | −1979 | −1062 | −1648 | 2444 | −971 | −2105 | −3054 | −2475 | 53 |
| — | −149 | −500 | 233 | 43 | −381 | 399 | 106 | −626 | 210 | −466 | −720 | 275 | 394 | 45 | 96 | 359 | 117 | −369 | −294 | −249 | |
| — | −16 | −7108 | −8150 | −894 | −1115 | −701 | −1378 | * | * | | | | | | | | | | | | |
| 49(M) | −411 | −857 | −1800 | −1434 | −1528 | 1914 | −1202 | −1029 | −1247 | −1347 | 2989 | −1217 | −1912 | −1119 | −1444 | −676 | 1550 | −767 | −1922 | −1539 | 54 |
| — | −149 | −500 | 233 | 43 | −381 | 399 | 106 | −626 | 210 | −466 | −720 | 275 | 394 | 45 | 96 | 359 | 117 | −369 | −294 | −249 | |
| — | −16 | −7108 | −8150 | −894 | −1115 | −701 | −1378 | * | * | | | | | | | | | | | | |
| 50(W) | −782 | −1258 | 793 | −683 | 1193 | 346 | 2051 | −932 | −556 | −1092 | −441 | −798 | −1993 | −426 | −909 | −904 | −720 | −779 | 3163 | 1546 | 55 |
| — | −149 | −500 | 233 | 43 | −381 | 399 | 106 | −626 | 210 | −466 | −720 | 275 | 394 | 45 | 96 | 359 | 117 | −369 | −294 | −249 | |
| — | −16 | −7108 | −8150 | −894 | −1115 | −701 | −1378 | * | * | | | | | | | | | | | | |
| 51(W) | 1009 | −798 | −1470 | −935 | −463 | −1773 | −545 | −460 | −751 | −736 | −66 | −943 | −1904 | −606 | −1002 | 1604 | −507 | −322 | 2535 | 1521 | 56 |
| — | −149 | −500 | 233 | 43 | −381 | 399 | 106 | −626 | 210 | −466 | −720 | 275 | 394 | 45 | 96 | 359 | 117 | −369 | −294 | −249 | |
| — | −16 | −7108 | −8150 | −894 | −1115 | −701 | −1378 | * | * | | | | | | | | | | | | |
| 52(D) | −1137 | −2711 | 2125 | 1647 | −2995 | −1523 | −617 | −2786 | −528 | −2743 | −1933 | −150 | −1897 | −234 | −1165 | −924 | 2117 | −2331 | −2948 | −2141 | 57 |
| — | −149 | −500 | 233 | 43 | −381 | 399 | 106 | −626 | 210 | −466 | −720 | 275 | 394 | 45 | 96 | 359 | 117 | −369 | −294 | −249 | |
| — | −16 | −7108 | −8150 | −894 | −1115 | −701 | −1378 | * | * | | | | | | | | | | | | |
| 53(I) | −599 | −1102 | −1031 | −829 | −1522 | 1429 | −927 | 2119 | −880 | −1369 | −699 | 1692 | −1938 | −759 | −1188 | −799 | −698 | −689 | −1887 | −1419 | 58 |
| — | −149 | −500 | 233 | 43 | −381 | 399 | 106 | −626 | 210 | −466 | −720 | 275 | 394 | 45 | 96 | 359 | 117 | −369 | −294 | −249 | |
| — | −16 | −7108 | −8150 | −894 | −1115 | −701 | −1378 | * | * | | | | | | | | | | | | |
| 54(T) | −666 | −1412 | −954 | −984 | −2702 | −1428 | −1357 | −2418 | −1208 | −2650 | −1886 | 2293 | −2000 | −1101 | −1519 | −787 | 2967 | −1835 | −2866 | −2360 | 59 |
| — | −149 | −500 | 233 | 43 | −381 | 399 | 106 | −626 | 210 | −466 | −720 | 275 | 394 | 45 | 96 | 359 | 117 | −369 | −294 | −249 | |
| — | −16 | −7108 | −8150 | −894 | −1115 | −701 | −1378 | * | * | | | | | | | | | | | | |
| 55(P) | −632 | −1230 | −2074 | −2144 | −2996 | −1453 | −2116 | −2631 | −2128 | −2928 | −2213 | −1658 | 3610 | −2006 | −2221 | −852 | 1302 | −1931 | −3185 | −2917 | 60 |
| — | −149 | −500 | 233 | 43 | −381 | 399 | 106 | −626 | 210 | −466 | −720 | 275 | 394 | 45 | 96 | 359 | 117 | −369 | −294 | −249 | |
| — | −16 | −7108 | −8150 | −894 | −1115 | −701 | −1378 | * | * | | | | | | | | | | | | |
| 56(C) | −2476 | 5735 | −4102 | −4358 | −3712 | −2763 | −3545 | −3518 | −4167 | −3859 | −3569 | −3631 | −3363 | −4030 | −3832 | −2793 | −2860 | −3158 | −3464 | −3718 | 61 |
| — | −149 | −500 | 233 | 43 | −381 | 399 | 106 | −626 | 210 | −466 | −720 | 275 | 394 | 45 | 96 | 359 | 117 | −369 | −294 | −249 | |
| — | −16 | −7108 | −8150 | −894 | −1115 | −701 | −1378 | * | * | | | | | | | | | | | | |
| 57(N) | −2171 | −2655 | −1458 | −1748 | −3334 | −2364 | −2267 | −3943 | −2365 | −3936 | −3437 | 4205 | −2932 | −2205 | −2608 | −2224 | −2439 | −3392 | −3253 | −2909 | 62 |
| — | −149 | −500 | 233 | 43 | −381 | 399 | 106 | −626 | 210 | −466 | −720 | 275 | 394 | 45 | 96 | 359 | 117 | −369 | −294 | −249 | |
| — | −16 | −7108 | −8150 | −894 | −1115 | −701 | −1378 | * | * | | | | | | | | | | | | |
| 58(M) | 672 | −918 | −3119 | −2578 | −742 | −2668 | −1734 | 1807 | −2263 | 16 | 3713 | −2271 | −2704 | −1960 | −2216 | −1806 | −1058 | 493 | −1612 | −1306 | 63 |
| — | −149 | −500 | 233 | 43 | −381 | 399 | 106 | −626 | 210 | −466 | −720 | 275 | 394 | 45 | 96 | 359 | 117 | −369 | −294 | −249 | |
| — | −16 | −7108 | −8150 | −894 | −1115 | −701 | 1378 | * | * | | | | | | | | | | | | |
| 59(H) | −1525 | −2164 | −1235 | −1346 | −2509 | 2296 | 4235 | −3172 | −1516 | −3178 | −2523 | −1448 | −2541 | −1520 | −1760 | −1591 | −1741 | −2656 | −2681 | −2065 | 64 |
| — | −149 | −500 | 233 | 43 | −381 | 399 | 106 | −626 | 210 | −466 | −720 | 275 | 394 | 45 | 96 | 359 | 117 | −369 | −294 | −249 | |
| — | −16 | −7108 | −8150 | −894 | −1115 | −701 | −1378 | * | * | | | | | | | | | | | | |
| 60(L) | −2478 | −2009 | −4717 | −4196 | −568 | −4424 | −3262 | 1334 | −3887 | 2824 | 604 | −4085 | −3872 | −3088 | −3590 | −3717 | −2380 | −199 | −2217 | −2207 | 65 |
| — | −149 | −500 | 233 | 43 | −381 | 399 | 106 | −626 | 210 | −466 | −720 | 275 | 394 | 45 | 96 | 359 | 117 | −369 | −294 | −249 | |
| — | −16 | −7108 | −8150 | −894 | −1115 | −701 | −1378 | * | * | | | | | | | | | | | | |
| 61(H) | −682 | −2191 | 1015 | 275 | −2485 | 396 | 2379 | −2251 | 62 | −2197 | −1307 | 1826 | −1636 | 1527 | −480 | −529 | −641 | −1803 | −2375 | −1654 | 66 |
| — | −149 | −500 | 233 | 43 | −381 | 399 | 106 | −626 | 210 | −466 | −720 | 275 | 394 | 45 | 96 | 359 | 117 | −369 | −294 | −249 | |
| — | −16 | −7108 | −8150 | −894 | −1115 | −701 | −1378 | * | * | | | | | | | | | | | | |
| 62(D) | −575 | −1920 | 1979 | 184 | −2299 | 94 | −242 | −2029 | 114 | −2023 | −1144 | −120 | −1608 | 186 | 1063 | −469 | 1413 | −1605 | −2229 | −1561 | 67 |
| — | −149 | −500 | 233 | 43 | −381 | 399 | 106 | −626 | 210 | −466 | −720 | 275 | 394 | 45 | 96 | 359 | 117 | −369 | −294 | −249 | |
| — | −16 | −7108 | −8150 | −894 | −1115 | −701 | −1378 | * | * | | | | | | | | | | | | |
| 63(L) | −2618 | −2139 | −4597 | −4163 | 2144 | −4285 | −2334 | −83 | −3854 | 2690 | 538 | −3771 | −3806 | −2950 | −3488 | −3563 | −2505 | −751 | −1442 | −808 | 68 |
| — | −149 | −500 | 233 | 43 | −381 | 399 | 106 | −626 | 210 | −466 | −720 | 275 | 394 | 45 | 96 | 359 | 117 | −369 | −294 | −249 | |
| — | −16 | −7108 | −8150 | −894 | −1115 | −701 | −1378 | * | * | | | | | | | | | | | | |
| 64(A) | 2657 | −1033 | −2408 | −2532 | −3233 | 2193 | −2364 | −2950 | −2626 | −3237 | −2386 | −1719 | −2027 | −2301 | −2635 | −655 | −850 | −1988 | −3420 | −3231 | 69 |
| — | −149 | −500 | 233 | 43 | −381 | 399 | 106 | −626 | 210 | −466 | −720 | 275 | 394 | 45 | 96 | 359 | 117 | −369 | −294 | −249 | |
| — | −16 | −7108 | −8150 | −894 | −1115 | −701 | −1378 | * | * | | | | | | | | | | | | |
| 65(K) | −443 | −1857 | 958 | 270 | −2158 | −1393 | −66 | −1890 | 1839 | −442 | −957 | −36 | −1499 | 1204 | −132 | 616 | −382 | −1469 | −2048 | −1383 | 70 |
| — | −149 | −500 | 233 | 43 | −381 | 399 | 106 | −626 | 210 | −466 | −720 | 275 | 394 | 45 | 96 | 359 | 117 | −369 | −294 | −249 | |
| — | −16 | −7108 | −8150 | −894 | −1115 | −701 | −1378 | * | * | | | | | | | | | | | | |
| 66(C) | 605 | 1553 | 739 | −17 | −1374 | −1488 | −182 | 260 | 969 | −203 | −397 | −263 | −1573 | 159 | 691 | −426 | −331 | −761 | −1567 | −1032 | 71 |
| — | −149 | −500 | 233 | 43 | −381 | 399 | 106 | −626 | 210 | −466 | −720 | 275 | 394 | 45 | 96 | 359 | 117 | −369 | −294 | −249 | |
| — | −16 | −7108 | −8150 | −894 | −1115 | −701 | −1378 | * | * | | | | | | | | | | | | |
| 67(A) | 2327 | −956 | −3193 | −2728 | −1289 | −2677 | −2114 | 1664 | −2485 | −601 | −288 | −2403 | −2839 | −2263 | −2523 | −1871 | −1126 | 1617 | −2143 | −1765 | 72 |
| — | −149 | −500 | 233 | 43 | −381 | 399 | 106 | −626 | 210 | −466 | −720 | 275 | 394 | 45 | 96 | 359 | 117 | −369 | −294 | −249 | |
| — | −16 | −7108 | −8150 | −894 | −1115 | −701 | −1378 | * | * | | | | | | | | | | | | |
| 68(K) | −532 | −1656 | −490 | 1321 | −1891 | −1527 | −172 | −124 | 2206 | −1591 | −782 | −223 | −1619 | 237 | −106 | −482 | −464 | −98 | −1904 | −1326 | 73 |
| — | −149 | −500 | 233 | 43 | −381 | 399 | 106 | −626 | 210 | −466 | −720 | 275 | 394 | 45 | 96 | 359 | 117 | −369 | −294 | −249 | |
| — | −16 | −7108 | −8150 | −894 | −1115 | −701 | −1378 | * | * | | | | | | | | | | | | |
| 69(H) | 384 | −1854 | 936 | 889 | −2165 | −1363 | 1498 | −1909 | 1111 | −1866 | −948 | 1091 | −1464 | 421 | −131 | −284 | −342 | −69 | −2043 | −1364 | 74 |
| — | −149 | −500 | 233 | 43 | −381 | 399 | 106 | −626 | 210 | −466 | −720 | 275 | 394 | 45 | 96 | 359 | 117 | −369 | −294 | −249 | |
| — | −16 | −7108 | −8150 | −894 | −1115 | −701 | −1378 | * | * | | | | | | | | | | | | |
| 70(G) | 1823 | −932 | −2330 | −2313 | −3120 | 2511 | −2158 | −2865 | −2331 | −3098 | −2209 | −1563 | −1912 | −2032 | −2419 | 1138 | −706 | −1883 | −3328 | −3077 | 75 |
| — | −149 | −500 | 233 | 43 | −381 | 399 | 106 | −626 | 210 | −466 | −720 | 275 | 394 | 45 | 96 | 359 | 117 | −369 | −294 | −249 | |
| — | −16 | −7108 | −8150 | −894 | −1115 | −701 | −1378 | * | * | | | | | | | | | | | | |
| 71(V) | −1760 | −1333 | −4244 | −3789 | −1262 | −3902 | −3190 | 1495 | −3588 | 1270 | −96 | −3536 | −3677 | −3238 | −3534 | −3148 | −1725 | 2865 | −2654 | −2373 | 76 |
| — | −149 | −500 | 233 | 43 | −381 | 399 | 106 | −626 | 210 | −466 | −720 | 275 | 394 | 45 | 96 | 359 | 117 | −369 | −294 | −249 | |
| — | −16 | −7108 | −8150 | −894 | −1115 | −701 | −1378 | * | * | | | | | | | | | | | | |
| 72(W) | −1054 | −2172 | −1112 | −403 | −2566 | −1917 | −286 | −2196 | 2516 | −2095 | −1292 | 1183 | −1958 | 140 | 1333 | −959 | −922 | −1867 | 2591 | −1720 | 77 |
| — | −149 | −500 | 233 | 43 | −381 | 399 | 106 | −626 | 210 | −466 | −720 | 275 | 394 | 45 | 96 | 359 | 117 | −369 | −294 | −249 | |
| — | −16 | −7108 | −8150 | −894 | −1115 | −701 | −1378 | * | * | | | | | | | | | | | | |
| 73(D) | 611 | −1995 | 1525 | 937 | −2295 | −1400 | −148 | −2043 | 211 | −2006 | −1106 | −37 | −1553 | 1420 | −312 | −408 | 1235 | −1609 | −2193 | −1499 | 78 |
| — | −149 | −500 | 233 | 43 | −381 | 399 | 106 | −626 | 210 | −466 | −720 | 275 | 394 | 45 | 96 | 359 | 117 | −369 | −294 | −249 | |
| — | −16 | −7108 | −8150 | −894 | −1115 | −701 | −1378 | * | * | | | | | | | | | | | | |
| 74(A) | 2716 | −902 | −2380 | −2205 | −2799 | −1197 | −1975 | −2459 | −2081 | −2736 | −1895 | −1520 | −1895 | −1844 | −2201 | 1191 | 1299 | −1669 | −3045 | −2758 | 79 |
| — | −149 | −500 | 233 | 43 | −381 | 399 | 106 | −626 | 210 | −466 | −720 | 275 | 394 | 45 | 96 | 359 | 117 | −369 | −294 | −249 | |
| — | −16 | −7108 | −8150 | −894 | −1115 | −701 | −1378 | * | * | | | | | | | | | | | | |
| 75(G) | −1709 | −2833 | 2424 | −409 | −3781 | 2819 | −1457 | −3777 | −1728 | −3733 | −3076 | −739 | −2389 | −1180 | −2441 | −1557 | −1893 | −3158 | −3660 | −3038 | 80 |
| — | −149 | −500 | 233 | 43 | −381 | 399 | 106 | −626 | 210 | −466 | −720 | 275 | 394 | 45 | 96 | 359 | 117 | −369 | −294 | −249 | |
| — | −212 | −2909 | −8150 | −273 | −2534 | −701 | −1378 | * | * | | | | | | | | | | | | |
| 76(A) | 2529 | −1119 | −2614 | −2330 | −1245 | −1983 | −1829 | −377 | −2042 | 1435 | −341 | −1937 | −2411 | −1873 | −2088 | −1266 | −1059 | −397 | −2063 | −1713 | 82 |
| — | −149 | −500 | 233 | 43 | −381 | 399 | 106 | −626 | 210 | −466 | −720 | 275 | 394 | 45 | 96 | 359 | 117 | −369 | −294 | −249 | |
| — | −16 | −7108 | −8150 | −894 | −1115 | −701 | −1378 | * | * | | | | | | | | | | | | |
| 77(W) | −472 | −361 | −2421 | −1812 | −298 | −1979 | −826 | 1164 | −1486 | −143 | 2485 | 873 | −2028 | −1185 | −1426 | −1048 | −412 | 1116 | 2999 | −454 | 83 |
| — | −149 | −500 | 233 | 43 | −381 | 399 | 106 | −626 | 210 | −466 | −720 | 275 | 394 | 45 | 96 | 359 | 117 | −369 | −294 | −249 | |
| — | −16 | −7108 | −8150 | −894 | −1115 | −701 | −1378 | * | * | | | | | | | | | | | | |
| 78(P) | −1198 | −1737 | −2187 | −2394 | −3665 | 2006 | −2550 | −3630 | −2743 | −3756 | −3008 | −2052 | 3474 | −2495 | −2835 | −1401 | −1593 | −2736 | −3511 | −3519 | 84 |
| — | −149 | −500 | 233 | 43 | −381 | 399 | 106 | −626 | 210 | −466 | −720 | 275 | 394 | 45 | 96 | 359 | 117 | −369 | −294 | −249 | |
| — | −16 | −7108 | −8150 | −894 | −1115 | −701 | −1378 | * | * | | | | | | | | | | | | |
| 79(Q) | −999 | −1075 | −2106 | −1568 | −726 | −2370 | −1175 | 83 | −1185 | 1373 | 218 | −1566 | −2400 | 2445 | −1340 | −1445 | −946 | 1441 | −1501 | −1146 | 85 |
| — | −149 | −500 | 233 | 43 | −381 | 399 | 106 | −626 | 210 | −466 | −720 | 275 | 394 | 45 | 96 | 359 | 117 | −369 | −294 | −249 | |
| — | −16 | −7108 | −8150 | −894 | −1115 | −701 | −1378 | * | * | | | | | | | | | | | | |
| 80(Q) | −885 | −779 | −2609 | −2018 | −481 | −2414 | −1253 | 1645 | −1736 | 799 | 1924 | −1827 | −2405 | 2262 | −1752 | −1484 | −821 | 802 | −1240 | −935 | 86 |
| — | −149 | −500 | 233 | 43 | −381 | 399 | 106 | −626 | 210 | −466 | −720 | 275 | 394 | 45 | 96 | 359 | 117 | −369 | −294 | −249 | |
| — | −16 | −7108 | −8150 | −894 | −1115 | −701 | −1378 | * | * | | | | | | | | | | | | |
| 81(F) | −3342 | −2776 | −4026 | −4232 | 4354 | −3545 | −1431 | −2315 | −4038 | −1801 | −1900 | −3299 | −3780 | −3350 | −3645 | −3490 | −3420 | −2566 | −739 | 349 | 87 |
| — | −149 | −500 | 233 | 43 | −381 | 399 | 106 | −626 | 210 | −466 | −720 | 275 | 394 | 45 | 96 | 359 | 117 | −369 | −294 | −249 | |
| — | −16 | −7108 | −8150 | −894 | −1115 | −701 | −1378 | * | * | | | | | | | | | | | | |
| 82(G) | −998 | −2100 | −120 | −175 | −2567 | 2528 | 2174 | −2558 | −587 | −2583 | −1806 | 1422 | −1966 | −461 | −1038 | −925 | −1088 | −2095 | −2657 | −1948 | 88 |
| — | −149 | −500 | 233 | 43 | −381 | 399 | 106 | −626 | 210 | −466 | −720 | 275 | 394 | 45 | 96 | 359 | 117 | −369 | −294 | −249 | |
| — | −16 | −7108 | −8150 | −894 | −1115 | −701 | −1378 | * | * | | | | | | | | | | | | |
| 83(T) | −1213 | −1674 | −2755 | −2906 | −3163 | −1922 | −2659 | −2698 | −2788 | −3105 | −2612 | −2311 | −2600 | −2708 | −2753 | −1463 | 3819 | −2197 | −3286 | −3156 | 89 |
| — | −149 | −500 | 233 | 43 | −381 | 399 | 106 | −626 | 210 | −466 | −720 | 275 | 394 | 45 | 96 | 359 | 117 | −369 | −294 | −249 | |
| — | −16 | −7108 | −8150 | −894 | −1115 | −701 | 1378 | * | * | | | | | | | | | | | | |
| 84(I) | −1286 | −1279 | −2907 | −2683 | −1446 | −2549 | −2198 | 3290 | −2407 | −726 | −534 | −2386 | 1172 | −2299 | −2437 | −1895 | −1392 | 283 | −2302 | −1913 | 90 |
| — | −149 | −500 | 233 | 43 | −381 | 399 | 106 | −626 | 210 | −466 | −720 | 275 | 394 | 45 | 96 | 359 | 117 | −369 | −294 | −249 | |
| — | −16 | −7108 | −8150 | −894 | −1115 | −701 | −1378 | * | * | | | | | | | | | | | | |
| 85(T) | −493 | −1105 | −2189 | −2267 | −3101 | 1880 | −2196 | −2791 | −2334 | −3081 | −2269 | −1649 | −2058 | −2099 | −2410 | −719 | 3135 | −1948 | −3282 | −3046 | 91 |
| — | −149 | −500 | 233 | 43 | −381 | 399 | 106 | −626 | 210 | −466 | −720 | 275 | 394 | 45 | 96 | 359 | 117 | −369 | −294 | −249 | |
| — | −16 | −7108 | −8150 | −894 | −1115 | −701 | −1378 | * | * | | | | | | | | | | | | |
| 86(V) | −1750 | −1296 | −4319 | −3957 | −1765 | −4038 | −3733 | 2364 | −3826 | −619 | −543 | −3716 | −3869 | −3685 | −3902 | −3354 | −1743 | 3012 | −3265 | −2817 | 92 |
| — | −149 | −500 | 233 | 43 | −381 | 399 | 106 | −626 | 210 | −466 | −720 | 275 | 394 | 45 | 96 | 359 | 117 | −369 | −294 | −249 | |
| — | −16 | −7108 | −8150 | −894 | −1115 | −701 | −1378 | * | * | | | | | | | | | | | | |
| 87(S) | 923 | −962 | −2348 | −2422 | −3132 | −1207 | −2248 | −2850 | −2440 | −3140 | −2285 | −1624 | −1954 | −2158 | −2477 | 3171 | −758 | −1896 | −3362 | −3103 | 93 |
| — | −149 | −500 | 233 | 43 | −381 | 399 | 106 | −626 | 210 | −466 | −720 | 275 | 394 | 45 | 96 | 359 | 117 | −369 | −294 | −249 | |
| — | −16 | −7108 | −8150 | −894 | −1115 | −701 | −1378 | * | * | | | | | | | | | | | | |
| 88(D) | −2784 | −3432 | 4016 | −1200 | −4140 | −2466 | −2197 | −4505 | −2621 | −4365 | −3956 | −1551 | −3014 | −2039 | −3232 | −2593 | −2938 | −4046 | −3710 | −3552 | 94 |
| — | −149 | −500 | 233 | 43 | −381 | 399 | 106 | −626 | 210 | −466 | −720 | 275 | 394 | 45 | 96 | 359 | 117 | −369 | −294 | −249 | |
| — | −16 | −7108 | −8150 | −894 | −1115 | −701 | −1378 | * | * | | | | | | | | | | | | |
| 89(G) | −2594 | −2690 | −3304 | −3623 | −4328 | 3747 | −3462 | −4761 | −3953 | −4671 | −4212 | −3320 | −3352 | −3748 | −3779 | −2839 | −2981 | −4004 | −3668 | −4222 | 95 |
| — | −149 | −500 | 233 | 43 | −381 | 399 | 106 | −626 | 210 | −466 | −720 | 275 | 394 | 45 | 96 | 359 | 117 | −369 | −294 | −249 | |
| — | −16 | −7108 | −8150 | −894 | −1115 | −701 | −1378 | * | * | | | | | | | | | | | | |
| 90(I) | −1880 | −1493 | −4193 | −3724 | −953 | −3837 | −2980 | 3251 | −3420 | 257 | 2372 | −3485 | −3608 | −3005 | −3310 | −3087 | −1840 | 617 | −2373 | −2155 | 96 |
| — | −149 | −500 | 233 | 43 | −381 | 399 | 106 | −626 | 210 | −466 | −720 | 275 | 394 | 45 | 96 | 359 | 117 | −369 | −294 | −249 | |
| — | −16 | −7108 | −8150 | −894 | −1115 | −701 | −1378 | * | * | | | | | | | | | | | | |
| 91(S) | 2150 | −939 | −2407 | −2415 | −3075 | −1197 | −2205 | −2781 | −2384 | −3065 | −2205 | −1613 | −1936 | −2105 | −2436 | 2652 | −729 | −1850 | −3306 | −3049 | 97 |
| — | −149 | −500 | 233 | 43 | −381 | 399 | 106 | −626 | 210 | −466 | −720 | 275 | 394 | 45 | 96 | 359 | 117 | −369 | −294 | −249 | |
| — | −16 | −7108 | −8150 | −894 | −1115 | −701 | −1378 | * | * | | | | | | | | | | | | |
| 92(M) | −979 | −1455 | −1242 | −1122 | −1434 | −1860 | −1131 | −1171 | −974 | −1285 | 4091 | 2176 | −2226 | −1017 | −1187 | −1166 | −1086 | −1063 | −1929 | −1345 | 98 |
| — | −149 | −500 | 233 | 43 | −381 | 399 | 106 | −626 | 210 | −466 | −720 | 275 | 394 | 45 | 96 | 359 | 117 | −369 | −294 | −249 | |
| — | −16 | −7108 | −8150 | −894 | −1115 | −701 | −1378 | * | * | | | | | | | | | | | | |
| 93(G) | −2594 | −2690 | −3304 | −3623 | −4328 | 3747 | −3462 | −4761 | −3953 | −4671 | −4212 | −3320 | −3352 | −3748 | −3779 | −2839 | −2981 | −4004 | −3668 | −4222 | 99 |
| — | −149 | −500 | 233 | 43 | −381 | 399 | 106 | −626 | 210 | −466 | −720 | 275 | 394 | 45 | 96 | 359 | 117 | −369 | −294 | −249 | |
| — | −16 | −7108 | −8150 | −894 | −1115 | −701 | −1378 | * | * | | | | | | | | | | | | |
| 94(T) | −959 | −1691 | −1249 | −949 | −2563 | −1747 | −929 | −2093 | 1282 | −2263 | −1554 | −995 | −2115 | −600 | −354 | −1037 | 3152 | −1726 | −2494 | −2098 | 100 |
| — | −149 | −500 | 233 | 43 | −381 | 399 | 106 | −626 | 210 | −466 | −720 | 275 | 394 | 45 | 96 | 359 | 117 | −369 | −294 | −249 | |
| — | −16 | −7108 | −8150 | −894 | −1115 | −701 | −1378 | * | * | | | | | | | | | | | | |
| 95(E) | −572 | −1860 | −208 | 2213 | −2107 | −1461 | −191 | −1808 | 199 | −116 | −983 | −127 | 318 | 1199 | −269 | −475 | −517 | −1448 | −2078 | −1441 | 101 |
| — | −149 | −500 | 233 | 43 | −381 | 399 | 106 | −626 | 210 | −466 | −720 | 275 | 394 | 45 | 96 | 359 | 117 | −369 | −294 | −249 | |
| — | −16 | −7108 | −8150 | −894 | −1115 | −701 | −1378 | * | * | | | | | | | | | | | | |
| 96(G) | −2594 | −2690 | −3304 | −3623 | −4328 | 3747 | −3462 | −4761 | −3953 | −4671 | −4212 | −3320 | −3352 | −3748 | −3779 | −2839 | −2981 | −4004 | −3668 | −4222 | 102 |
| — | −149 | −500 | 233 | 43 | −381 | 399 | 106 | −626 | 210 | −466 | −720 | 275 | 394 | 45 | 96 | 359 | 117 | −369 | −294 | −249 | |
| — | −16 | −7108 | −8150 | −894 | −1115 | −701 | −1378 | * | * | | | | | | | | | | | | |
| 97(M) | −2406 | −2296 | −3638 | −3594 | −1525 | −3105 | −2824 | −1047 | −3121 | −596 | 5043 | −3293 | −3425 | −3046 | −2996 | −2911 | −2552 | −1398 | −2513 | −2207 | 103 |
| — | −149 | −500 | 233 | 43 | −381 | 399 | 106 | −626 | 210 | −466 | −720 | 275 | 394 | 45 | 96 | 359 | 117 | −369 | −294 | −249 | |
| — | −16 | −7108 | −8150 | −894 | −1115 | −701 | −1378 | * | * | | | | | | | | | | | | |
| 98(R) | −2097 | −2786 | −2688 | −1415 | −3622 | −2625 | −555 | −2964 | 2585 | −2627 | −1957 | −1318 | −2577 | −137 | 3015 | −1979 | −1791 | −2732 | −2469 | −2363 | 104 |
| — | −149 | −500 | 233 | 43 | −381 | 399 | 106 | −626 | 210 | −466 | −720 | 275 | 394 | 45 | 96 | 359 | 117 | −369 | −294 | −249 | |
| — | −16 | −7108 | −8150 | −894 | −1115 | −701 | −1378 | * | * | | | | | | | | | | | | |
| 99(Y) | −3615 | −2706 | −4169 | −4413 | 2626 | −4044 | −396 | −2535 | −3993 | −1939 | −1985 | −2747 | −3930 | −2852 | −3446 | −3296 | −3494 | −2686 | 347 | 4252 | 105 |
| — | −149 | −500 | 233 | 43 | −381 | 399 | 106 | −626 | 210 | −466 | −720 | 275 | 394 | 45 | 96 | 359 | 117 | −369 | −294 | −249 | |
| — | −16 | −7108 | −8150 | −894 | −1115 | −701 | −1378 | * | * | | | | | | | | | | | | |
| 100(S) | −897 | −1462 | −2333 | −2543 | −3185 | −1640 | −2474 | −3294 | −2686 | −3497 | −2780 | −1973 | −2360 | −2483 | −2703 | 3465 | −1316 | −2413 | −3310 | −3025 | 106 |
| — | −149 | −500 | 233 | 43 | −381 | 399 | 106 | −626 | 210 | −466 | −720 | 275 | 394 | 45 | 96 | 359 | 117 | −369 | −294 | −249 | |
| — | −16 | −7108 | −8150 | −894 | −1115 | −701 | −1378 | * | * | | | | | | | | | | | | |
| 101(L) | −2871 | −2457 | −4231 | −4103 | −1033 | −3803 | −3165 | −541 | −3734 | 3130 | −31 | −3935 | −3797 | −3286 | −3484 | −3713 | −2869 | −1136 | −2394 | −2220 | 107 |
| — | −149 | −500 | 233 | 43 | −381 | 399 | 106 | −626 | 210 | −466 | −720 | 275 | 394 | 45 | 96 | 359 | 117 | −369 | −294 | −249 | |
| — | −16 | −7108 | −8150 | −894 | −1115 | −701 | −1378 | * | * | | | | | | | | | | | | |
| 102(V) | −1381 | −1065 | −3714 | −3252 | −1453 | −3300 | −2646 | 1872 | −3023 | −615 | −373 | −2949 | −3287 | −2816 | −3039 | −2506 | 1346 | 2750 | −2489 | −2087 | 108 |
| — | −149 | −500 | 233 | 43 | −381 | 399 | 106 | −626 | 210 | −466 | −720 | 275 | 394 | 45 | 96 | 359 | 117 | −369 | −294 | −249 | |
| — | −16 | −7108 | −8150 | −894 | −1115 | −701 | −1378 | * | * | | | | | | | | | | | | |
| 103(S) | −897 | −1462 | −2333 | −2543 | −3185 | −1640 | −2474 | −3294 | −2686 | −3497 | −2780 | −1973 | −2360 | −2483 | −2703 | 3465 | −1316 | −2413 | −3310 | −3025 | 109 |
| — | −149 | −500 | 233 | 43 | −381 | 399 | 106 | −626 | 210 | −466 | −720 | 275 | 394 | 45 | 96 | 359 | 117 | −369 | −294 | −249 | |
| — | −16 | −7108 | −8150 | −894 | −1115 | −701 | −1378 | * | * | | | | | | | | | | | | |
| 104(R) | −2957 | −3022 | −3318 | −2735 | −3796 | −2998 | −1968 | −3912 | −846 | −3631 | −3157 | −2611 | −3280 | −1724 | 4056 | −3026 | −2913 | −3650 | −3096 | −3185 | 110 |
| — | −149 | −500 | 233 | 43 | −381 | 399 | 106 | −626 | 210 | −466 | −720 | 275 | 394 | 45 | 96 | 359 | 117 | −369 | −294 | −249 | |
| — | −16 | −7108 | −8150 | −894 | −1115 | −701 | −1378 | * | * | | | | | | | | | | | | |
| 105(E) | −1719 | −3572 | 2596 | 2779 | −3767 | −1632 | −993 | −3700 | −1241 | −3578 | −2920 | −234 | −2167 | −666 | −2090 | −1380 | −1789 | −3182 | −3742 | −2756 | 111 |
| — | −149 | −500 | 233 | 43 | −381 | 399 | 106 | −626 | 210 | −466 | −720 | 275 | 394 | 45 | 96 | 359 | 117 | −369 | −294 | −249 | |
| — | −16 | −7108 | −8150 | −894 | −1115 | −701 | −1378 | * | * | | | | | | | | | | | | |
| 106(V) | −1746 | −1296 | −4308 | −3946 | −1757 | −4020 | −3712 | 2190 | −3811 | −614 | −539 | −3702 | −3858 | −3667 | −3884 | −3336 | −1740 | 3098 | −3250 | −2803 | 112 |
| — | −149 | −500 | 233 | 43 | −381 | 399 | 106 | −626 | 210 | −466 | −720 | 275 | 394 | 45 | 96 | 359 | 117 | −369 | −294 | −249 | |
| — | −16 | −7108 | −8150 | −894 | −1115 | −701 | −1378 | * | * | | | | | | | | | | | | |
| 107(I) | −2091 | −1746 | −3971 | −3840 | −1676 | −3532 | −3289 | 3684 | −3581 | −659 | −693 | −3562 | −3674 | −3445 | −3521 | −3194 | −2146 | 449 | −2877 | −2493 | 113 |
| — | −149 | −500 | 233 | 43 | −381 | 399 | 106 | −626 | 210 | −466 | −720 | 275 | 394 | 45 | 96 | 359 | 117 | −369 | −294 | −249 | |
| — | −16 | −7108 | −8150 | −894 | −1115 | −701 | −1378 | * | * | | | | | | | | | | | | |
| 108(A) | 3438 | −1472 | −2846 | −3040 | −3287 | −1726 | −2735 | −2840 | −3028 | −3257 | −2662 | −2236 | −2447 | −2798 | −2944 | −1216 | −1387 | −2183 | −3405 | −3320 | 114 |
| — | −149 | −500 | 233 | 43 | −381 | 399 | 106 | −626 | 210 | −466 | −720 | 275 | 394 | 45 | 96 | 359 | 117 | −369 | −294 | −249 | |
| — | −16 | −7108 | −8150 | −894 | −1115 | −701 | −1378 | * | * | | | | | | | | | | | | |
| 109(D) | −2784 | −3432 | 4016 | −1200 | −4140 | −2466 | −2197 | −4505 | −2621 | −4365 | −3956 | −1551 | −3014 | −2039 | −3232 | −2593 | −2938 | −4046 | −3710 | −3552 | 115 |
| — | −149 | −500 | 233 | 43 | −381 | 399 | 106 | −626 | 210 | −466 | −720 | 275 | 394 | 45 | 96 | 359 | 117 | −369 | −294 | −249 | |
| — | −16 | −7108 | −8150 | −894 | −1115 | −701 | −1378 | * | * | | | | | | | | | | | | |
| 110(S) | −352 | 2942 | −2955 | −2957 | −2876 | −1254 | −2382 | −2573 | −2692 | −2927 | −2128 | −1827 | −2001 | −2405 | −2607 | 3103 | −778 | −1757 | −3171 | −2911 | 116 |
| — | −149 | −500 | 233 | 43 | −381 | 399 | 106 | −626 | 210 | −466 | −720 | 275 | 394 | 45 | 96 | 359 | 117 | −369 | −294 | −249 | |
| — | −16 | −7108 | −8150 | −894 | −1115 | −701 | −1378 | * | * | | | | | | | | | | | | |
| 111(I) | −2091 | −1746 | −3971 | −3840 | −1676 | −3532 | −3289 | 3684 | −3581 | −659 | −693 | −3562 | −3674 | −3445 | −3521 | −3194 | −2146 | 449 | −2877 | −2493 | 117 |
| — | −149 | −500 | 233 | 43 | −381 | 399 | 106 | −626 | 210 | −466 | −720 | 275 | 394 | 45 | 96 | 359 | 117 | −369 | −294 | −249 | |
| — | −16 | −7108 | −8150 | −894 | −1115 | −701 | −1378 | * | * | | | | | | | | | | | | |
| 112(E) | −2641 | −3308 | −896 | 3732 | −3966 | −2458 | −2043 | −4105 | −2128 | −4016 | −3555 | −1531 | −2959 | −1842 | −2560 | −2479 | −2750 | −3722 | −3563 | −3385 | 118 |
| — | −149 | −500 | 233 | 43 | −381 | 399 | 106 | −626 | 210 | −466 | −720 | 275 | 394 | 45 | 96 | 359 | 117 | −369 | −294 | −249 | |
| — | −16 | −7108 | −8150 | −894 | −1115 | −701 | −1378 | * | * | | | | | | | | | | | | |
| 113(T) | 1556 | −936 | −2493 | −2457 | −2805 | −1256 | −2159 | −2210 | −2319 | −2681 | −1932 | −1656 | −1974 | −2089 | −2352 | −598 | 3235 | −1547 | −3111 | −2847 | 119 |
| — | −149 | −500 | 233 | 43 | −381 | 399 | 106 | −626 | 210 | −466 | −720 | 275 | 394 | 45 | 96 | 359 | 117 | −369 | −294 | −249 | |
| — | −16 | −7108 | −8150 | −894 | −1115 | −701 | −1378 | * | * | | | | | | | | | | | | |
| 114(C) | 1784 | 2119 | −2013 | −1532 | −1093 | −1580 | −1089 | −436 | −1322 | −937 | −273 | 1093 | −1932 | −1127 | −1472 | −748 | −515 | 1585 | −1536 | −1163 | 120 |
| — | −149 | −500 | 233 | 43 | −381 | 399 | 106 | −626 | 210 | −466 | −720 | 275 | 394 | 45 | 96 | 359 | 117 | −369 | −294 | −249 | |
| — | −16 | −7108 | −8150 | −894 | −1115 | −701 | −1378 | * | * | | | | | | | | | | | | |
| 115(M) | 1831 | 2019 | −2596 | −2038 | −605 | −1979 | −1126 | 244 | −1727 | −359 | 2501 | −1655 | −2145 | −1435 | −1683 | −1106 | −557 | 1087 | −1153 | −804 | 121 |
| — | −149 | −500 | 233 | 43 | −381 | 399 | 106 | −626 | 210 | −466 | −720 | 275 | 394 | 45 | 96 | 359 | 117 | −369 | −294 | −249 | |
| — | −16 | −7108 | −8150 | −894 | −1115 | −701 | −1378 | * | * | | | | | | | | | | | | |
| 116(Q) | −987 | −2211 | −43 | −62 | −2833 | 2229 | −691 | −2616 | −407 | −2604 | −1797 | 1197 | −1917 | 2260 | −858 | −880 | −1045 | −2139 | −2772 | −2099 | 122 |
| — | −149 | −500 | 233 | 43 | −381 | 399 | 106 | −626 | 210 | −466 | −720 | 275 | 394 | 45 | 96 | 359 | 117 | −369 | −294 | −249 | |
| — | −16 | −7108 | −8150 | −894 | −1115 | −701 | −1378 | * | * | | | | | | | | | | | | |
| 117(G) | 2313 | −1042 | −2391 | −2526 | −3250 | 2601 | −2372 | −2972 | −2637 | −3257 | −2407 | −1721 | −2032 | −2310 | −2646 | −662 | −859 | −2003 | −3434 | −3247 | 123 |
| — | −149 | −500 | 233 | 43 | −381 | 399 | 106 | −626 | 210 | −466 | −720 | 275 | 394 | 45 | 96 | 359 | 117 | −369 | −294 | −249 | |
| — | −16 | −7108 | −8150 | −894 | −1115 | −701 | −1378 | * | * | | | | | | | | | | | | |
| 118(Q) | −914 | −2350 | −48 | 1661 | −2621 | −1571 | 2504 | −2400 | 68 | −2331 | −1486 | −201 | −1796 | 2646 | −351 | −754 | −865 | −1984 | −2463 | −1787 | 124 |
| — | −149 | −500 | 233 | 43 | −381 | 399 | 106 | −626 | 210 | −466 | −720 | 275 | 394 | 45 | 96 | 359 | 117 | −369 | −294 | −249 | |
| — | −16 | −7108 | −8150 | −894 | −1115 | −701 | −1378 | * | * | | | | | | | | | | | | |
| 119(W) | −517 | −1294 | −733 | −183 | −1062 | −1605 | −234 | −1037 | 19 | −1207 | −456 | 1435 | −1690 | 33 | 756 | 411 | −454 | −819 | 3340 | 1286 | 125 |
| — | −149 | −500 | 233 | 43 | −381 | 399 | 106 | −626 | 210 | −466 | −720 | 275 | 394 | 45 | 96 | 359 | 117 | −369 | −294 | −249 | |
| — | −16 | −7108 | −8150 | −894 | −1115 | −701 | −1378 | * | * | | | | | | | | | | | | |
| 120(M) | 410 | −469 | −2417 | −1828 | −341 | −2041 | −897 | 195 | −1513 | −156 | 3130 | −1534 | −2102 | −1230 | −1484 | −1117 | −507 | 954 | −894 | 2253 | 126 |
| — | −149 | −500 | 233 | 43 | −381 | 399 | 106 | −626 | 210 | −466 | −720 | 275 | 394 | 45 | 96 | 359 | 117 | −369 | −294 | −249 | |
| — | −16 | −7108 | −8150 | −894 | −1115 | −701 | −1378 | * | * | | | | | | | | | | | | |
| 121(D) | −2784 | −3432 | 4016 | −1200 | −4140 | −2466 | −2197 | −4505 | −2621 | −4365 | −3956 | −1551 | −3014 | −2039 | −3232 | −2593 | −2938 | −4046 | −3710 | −3552 | 127 |
| — | −149 | −500 | 233 | 43 | −381 | 399 | 106 | −626 | 210 | −466 | −720 | 275 | 394 | 45 | 96 | 359 | 117 | −369 | −294 | −249 | |
| — | −16 | −7108 | −8150 | −894 | −1115 | −701 | −1378 | * | * | | | | | | | | | | | | |
| 122(G) | 2142 | −930 | −2334 | −2298 | −3100 | 2237 | −2139 | −2842 | −2302 | −3074 | −2187 | −1557 | −1909 | −2010 | −2397 | 1136 | −701 | −1871 | −3308 | −3053 | 128 |
| — | −149 | −500 | 233 | 43 | −381 | 399 | 106 | −626 | 210 | −466 | −720 | 275 | 394 | 45 | 96 | 359 | 117 | −369 | −294 | −249 | |
| — | −16 | −7108 | −8150 | −894 | −1115 | −701 | −1378 | * | * | | | | | | | | | | | | |
| 123(V) | −1514 | −1144 | −3950 | −3459 | 1821 | −3487 | −2577 | 2274 | −3208 | −209 | −87 | −3112 | −3362 | −2864 | −3118 | −2680 | −1476 | 2426 | −2194 | −1786 | 129 |
| — | −149 | −500 | 233 | 43 | −381 | 399 | 106 | −626 | 210 | −466 | −720 | 275 | 394 | 45 | 96 | 359 | 117 | −369 | −294 | −249 | |
| — | −16 | −7108 | −8150 | −894 | −1115 | −701 | −1378 | * | * | | | | | | | | | | | | |
| 124(V) | −1743 | −1294 | −4292 | −3873 | −1511 | −3988 | −3433 | 2287 | −3712 | 598 | −319 | −3626 | −3774 | −3456 | −3716 | −3260 | −1717 | 2790 | −2931 | −2577 | 130 |
| — | −149 | −500 | 233 | 43 | −381 | 399 | 106 | −626 | 210 | −466 | −720 | 275 | 394 | 45 | 96 | 359 | 117 | −369 | −294 | −249 | |
| — | −16 | −7108 | −8150 | −894 | −1115 | −701 | −1378 | * | * | | | | | | | | | | | | |
| 125(A) | 2911 | −954 | −2808 | −2665 | −2115 | −1577 | −2196 | −575 | −2445 | −1646 | −1202 | −1906 | −2208 | −2218 | −2451 | −901 | −876 | 1294 | −2727 | −2394 | 131 |
| — | −149 | −500 | 233 | 43 | −381 | 399 | 106 | −626 | 210 | −466 | −720 | 275 | 394 | 45 | 96 | 359 | 117 | −369 | −294 | −249 | |
| — | −16 | −7108 | −8150 | −894 | −1115 | −701 | −1378 | * | * | | | | | | | | | | | | |
| 126(I) | −1764 | −1323 | −4298 | −3936 | −1668 | −3994 | −3655 | 3337 | −3783 | −508 | −462 | −3689 | −3838 | −3608 | −3835 | −3311 | −1759 | 1847 | −3164 | −2747 | 132 |
| — | −149 | −500 | 233 | 43 | −381 | 399 | 106 | −626 | 210 | −466 | −720 | 275 | 394 | 45 | 96 | 359 | 117 | −369 | −294 | −249 | |
| — | −16 | −7108 | −8150 | −894 | −1115 | −701 | −1378 | * | * | | | | | | | | | | | | |
| 127(G) | −1157 | −1705 | −2169 | −2375 | −3654 | 3021 | −2534 | −3611 | −2730 | −3741 | −2984 | −2024 | 2418 | −2475 | −2826 | −1361 | −1555 | −2705 | −3513 | −3509 | 133 |
| — | −149 | −500 | 233 | 43 | −381 | 399 | 106 | −626 | 210 | −466 | −720 | 275 | 394 | 45 | 96 | 359 | 117 | −369 | −294 | −249 | |
| — | −16 | −7108 | −8150 | −894 | −1115 | −701 | −1378 | * | * | | | | | | | | | | | | |
| 128(G) | −2594 | −2690 | −3304 | −3623 | −4328 | 3747 | −3462 | −4761 | −3953 | −4671 | −4212 | −3320 | −3352 | −3748 | −3779 | −2839 | −2981 | −4004 | −3668 | −4222 | 134 |
| — | −149 | −500 | 233 | 43 | −381 | 399 | 106 | −626 | 210 | −466 | −720 | 275 | 394 | 45 | 96 | 359 | 117 | −369 | −294 | −249 | |
| — | −16 | −7108 | −8150 | −894 | −1115 | −701 | −1378 | * | * | | | | | | | | | | | | |
| 129(C) | −2476 | −5735 | −4102 | −4358 | −3712 | −2763 | −3545 | −3518 | −4167 | −3859 | −3569 | −3631 | −3363 | −4030 | −3832 | −2793 | −2860 | −3158 | −3464 | −3718 | 135 |
| — | −149 | −500 | 233 | 43 | −381 | 399 | 106 | −626 | 210 | −466 | −720 | 275 | 394 | 45 | 96 | 359 | 117 | −369 | −294 | −249 | |
| — | −16 | −7108 | −8150 | −894 | −1115 | −701 | −1378 | * | * | | | | | | | | | | | | |
| 130(D) | −2784 | −3432 | 4016 | −1200 | −4140 | −2466 | −2197 | −4505 | −2621 | −4365 | −3956 | −1551 | −3014 | −2039 | −3232 | −2593 | −2938 | −4046 | −3710 | −3552 | 136 |
| — | −149 | −500 | 233 | 43 | −381 | 399 | 106 | −626 | 210 | −466 | −720 | 275 | 394 | 45 | 96 | 359 | 117 | −369 | −294 | −249 | |
| — | −16 | −7108 | −8150 | −894 | −1115 | −701 | −1378 | * | * | | | | | | | | | | | | |
| 131(K) | −2620 | −2961 | −2461 | −2046 | −3743 | −2791 | −1570 | −3603 | 3784 | −3387 | −2839 | −2048 | −3039 | −1260 | −465 | −2604 | −2536 | −3331 | −3001 | −2988 | 137 |
| — | −149 | −500 | 233 | 43 | −381 | 399 | 106 | −626 | 210 | −466 | −720 | 275 | 394 | 45 | 96 | 359 | 117 | −369 | −294 | −249 | |
| — | −16 | −7108 | −8150 | −894 | −1115 | −701 | −1378 | * | * | | | | | | | | | | | | |
| 132(N) | −2171 | −2655 | −1458 | −1748 | −3334 | −2364 | −2267 | −3943 | −2365 | −3936 | −3437 | 4205 | −2932 | −2205 | −2608 | −2224 | −2439 | −3392 | −3253 | −2909 | 138 |
| — | −149 | −500 | 233 | 43 | −381 | 399 | 106 | −626 | 210 | −466 | −720 | 275 | 394 | 45 | 96 | 359 | 117 | −369 | −294 | −249 | |
| — | −16 | −7108 | −8150 | −894 | −1115 | −701 | −1378 | * | * | | | | | | | | | | | | |
| 133(M) | −2406 | −2296 | −3638 | −3594 | −1525 | −3105 | −2824 | −1047 | −3121 | −596 | 5043 | −3293 | −3425 | −3046 | −2996 | −2911 | −2552 | −1398 | −2513 | −2207 | 139 |
| — | −149 | −500 | 233 | 43 | −381 | 399 | 106 | −626 | 210 | −466 | −720 | 275 | 394 | 45 | 96 | 359 | 117 | −369 | −294 | −249 | |
| — | −16 | −7108 | −8150 | −894 | −1115 | −701 | −1378 | * | * | | | | | | | | | | | | |
| 134(P) | −2931 | −2878 | −3420 | −3706 | −4181 | −2925 | −3468 | −4621 | −3859 | −4490 | −4165 | −3491 | 4225 | −3781 | −3695 | −3182 | −3279 | −4087 | −3594 | −4064 | 140 |
| — | −149 | −500 | 233 | 43 | −381 | 399 | 106 | −626 | 210 | −466 | −720 | 275 | 394 | 45 | 96 | 359 | 117 | −369 | −294 | −249 | |
| — | −16 | −7108 | −8150 | −894 | −1115 | −701 | −1378 | * | * | | | | | | | | | | | | |
| 135(G) | −2594 | −2690 | −3304 | −3623 | −4328 | 3747 | −3462 | −4761 | −3953 | −4671 | −4212 | −3320 | −3352 | −3748 | −3779 | −2839 | −2981 | −4004 | −3668 | −4222 | 141 |
| — | −149 | −500 | 233 | 43 | −381 | 399 | 106 | −626 | 210 | −466 | −720 | 275 | 394 | 45 | 96 | 359 | 117 | −369 | −294 | −249 | |
| — | −16 | −7108 | −8150 | −894 | −1115 | −701 | −1378 | * | * | | | | | | | | | | | | |
| 136(A) | 2180 | −935 | −2286 | −2196 | −3057 | 1098 | −2058 | −2796 | −2174 | −3021 | −2134 | −1516 | −1898 | −1906 | −2302 | 2146 | −689 | −1849 | −3256 | −2983 | 142 |
| — | −149 | −500 | 233 | 43 | −381 | 399 | 106 | −626 | 210 | −466 | −720 | 275 | 394 | 45 | 96 | 359 | 117 | −369 | −294 | −249 | |
| — | −16 | −7108 | −8150 | −894 | −1115 | −701 | −1378 | * | * | | | | | | | | | | | | |
| 137(M) | −1799 | −1433 | −4142 | −3579 | −669 | −3668 | −2608 | 1558 | −3293 | 1235 | 3799 | −3296 | −3401 | −2717 | −3088 | −2843 | −1726 | 1156 | −2002 | −1868 | 143 |
| — | −149 | −500 | 233 | 43 | −381 | 399 | 106 | −626 | 210 | −466 | −720 | 275 | 394 | 45 | 96 | 359 | 117 | −369 | −294 | −249 | |
| — | −16 | −7108 | −8150 | −894 | −1115 | −701 | −1378 | * | * | | | | | | | | | | | | |
| 138(I) | −2091 | −1746 | −3971 | −3840 | −1676 | −3532 | −3289 | 3684 | −3581 | −659 | −693 | −3562 | −3674 | −3445 | −3521 | −3194 | −2146 | 449 | −2877 | −2493 | 144 |
| — | −149 | −500 | 233 | 43 | −381 | 399 | 106 | −626 | 210 | −466 | −720 | 275 | 394 | 45 | 96 | 359 | 117 | −369 | −294 | −249 | |
| — | −16 | −7108 | −8150 | −894 | −1115 | −701 | −1378 | * | * | | | | | | | | | | | | |
| 139(A) | 3103 | −1036 | −2445 | −2572 | −3222 | 1051 | −2380 | −2930 | −2650 | −3226 | −2381 | −1739 | −2034 | −2327 | −2648 | −664 | −857 | −1981 | −3412 | −3228 | 145 |
| — | −149 | −500 | 233 | 43 | −381 | 399 | 106 | −626 | 210 | −466 | −720 | 275 | 394 | 45 | 96 | 359 | 117 | −369 | −294 | −249 | |
| — | −16 | −7108 | −8150 | −894 | −1115 | −701 | −1378 | * | * | | | | | | | | | | | | |
| 140(M) | −2325 | −1891 | −4598 | −4012 | −498 | −4222 | −3013 | 1242 | −3722 | 1864 | 3929 | −3855 | −3711 | −2910 | −3414 | −3439 | −2215 | −299 | −2076 | −2098 | 146 |
| — | −149 | −500 | 233 | 43 | −381 | 399 | 106 | −626 | 210 | −466 | −720 | 275 | 394 | 45 | 96 | 359 | 117 | −369 | −294 | −249 | |
| — | −16 | −7108 | −8150 | −894 | −1115 | −701 | −1378 | * | * | | | | | | | | | | | | |
| 141(A) | 3103 | −1036 | −2445 | −2572 | −3222 | 1051 | −2380 | −2930 | −2650 | −3226 | −2381 | −1739 | −2034 | −2327 | −2648 | −664 | −857 | −1981 | −3412 | −3228 | 147 |
| — | −149 | −500 | 233 | 43 | −381 | 399 | 106 | −626 | 210 | −466 | −720 | 275 | 394 | 45 | 96 | 359 | 117 | −369 | −294 | −249 | |
| — | −16 | −7108 | −8150 | −894 | −1115 | −701 | −1378 | * | * | | | | | | | | | | | | |
| 142(R) | −1588 | −2442 | −1399 | −953 | −3069 | −2171 | −708 | −2795 | 373 | −2625 | −1916 | 1858 | −2357 | −324 | 3294 | −1520 | −1505 | −2453 | −2523 | −2186 | 148 |
| — | −149 | −500 | 233 | 43 | −381 | 399 | 106 | −626 | 210 | −466 | −720 | 275 | 394 | 45 | 96 | 359 | 117 | −369 | −294 | −249 | |
| — | −16 | −7108 | −8150 | −894 | −1115 | −701 | −1378 | * | * | | | | | | | | | | | | |
| 143(M) | −1448 | −1256 | −3396 | −2819 | −474 | −3024 | −1923 | 175 | −2473 | 2225 | 2756 | −2574 | −2922 | −2063 | −2375 | −2153 | 952 | −151 | −1599 | −1410 | 149 |
| — | −149 | −500 | 233 | 43 | −381 | 399 | 106 | −626 | 210 | −466 | −720 | 275 | 394 | 45 | 96 | 359 | 117 | −369 | −294 | −249 | |
| — | −16 | −7108 | −8150 | −894 | −1115 | −701 | −1378 | * | * | | | | | | | | | | | | |
| 144(N) | −1662 | −3306 | 2055 | 78 | −3621 | −1643 | −1040 | −3622 | −1272 | −3531 | −2870 | 3477 | −2182 | −724 | −2071 | −1371 | −1757 | −3092 | −3633 | −2700 | 150 |
| — | −149 | −500 | 233 | 43 | −381 | 399 | 106 | −626 | 210 | −466 | −720 | 275 | 394 | 45 | 96 | 359 | 117 | −369 | −294 | −249 | |
| — | −16 | −7108 | −8150 | −894 | −1115 | −701 | −1378 | * | * | | | | | | | | | | | | |
| 145(I) | −1066 | −921 | −2828 | −2239 | −1041 | −2675 | −1601 | 2235 | −1668 | −455 | −92 | −2067 | −2692 | −1688 | 1701 | −1795 | −1024 | 1960 | −1771 | −1396 | 151 |
| — | −149 | −500 | 233 | 43 | −381 | 399 | 106 | −626 | 210 | −466 | −720 | 275 | 394 | 45 | 96 | 359 | 117 | −369 | −294 | −249 | |
| — | −16 | −7108 | −8150 | −894 | −1115 | −701 | −1378 | * | * | | | | | | | | | | | | |
| 146(P) | −2931 | −2878 | −3420 | −3706 | −4181 | −2925 | −3468 | −4621 | −3859 | −4490 | −4165 | −3491 | 4225 | −3781 | −3695 | −3182 | −3279 | −4087 | −3594 | −4064 | 152 |
| — | −149 | −500 | 233 | 43 | −381 | 399 | 106 | −626 | 210 | −466 | −720 | 275 | 394 | 45 | 96 | 359 | 117 | −369 | −294 | −249 | |
| — | −16 | −7108 | −8150 | −894 | −1115 | −701 | −1378 | * | * | | | | | | | | | | | | |
| 147(S) | 1568 | −940 | −2267 | −2192 | −3082 | 1101 | −2068 | −2826 | −2185 | −3049 | −2159 | −1515 | −1901 | −1915 | −2313 | 2603 | −694 | −1866 | −3279 | −3006 | 153 |
| — | −149 | −500 | 233 | 43 | −381 | 399 | 106 | −626 | 210 | −466 | −720 | 275 | 394 | 45 | 96 | 359 | 117 | −369 | −294 | −249 | |
| — | −16 | −7108 | −8150 | −894 | −1115 | −701 | −1378 | * | * | | | | | | | | | | | | |
| 148(I) | −1880 | −1492 | −4195 | −3728 | −963 | −3841 | −2991 | 3272 | −3425 | 246 | 2277 | −3490 | −3613 | −3014 | −3317 | −3092 | −1841 | 628 | −2385 | −2163 | 154 |
| — | −149 | −500 | 233 | 43 | −381 | 399 | 106 | −626 | 210 | −466 | −720 | 275 | 394 | 45 | 96 | 359 | 117 | −369 | −294 | −249 | |
| — | −16 | −7108 | −8150 | −894 | −1115 | −701 | −1378 | * | * | | | | | | | | | | | | |
| 149(F) | −2204 | −1797 | −3724 | −3473 | 3206 | −3383 | −628 | −1077 | −3092 | −746 | 3167 | −2502 | −3309 | −2372 | −2792 | −2535 | −2120 | −1245 | 28 | 2460 | 155 |
| — | −149 | −500 | 233 | 43 | −381 | 399 | 106 | −626 | 210 | −466 | −720 | 275 | 394 | 45 | 96 | 359 | 117 | −369 | −294 | −249 | |
| — | −16 | −7108 | −8150 | −894 | −1115 | −701 | −1378 | * | * | | | | | | | | | | | | |
| 150(V) | 1265 | −1028 | −3200 | −2994 | −1833 | −2150 | −2480 | 417 | −2771 | −1122 | −818 | −2349 | −2640 | −2559 | −2766 | −1464 | −1118 | 3028 | −2700 | −2325 | 156 |
| — | −149 | −500 | 233 | 43 | −381 | 399 | 106 | −626 | 210 | −466 | −720 | 275 | 394 | 45 | 96 | 359 | 117 | −369 | −294 | −249 | |
| — | −16 | −7108 | −8150 | −894 | −1115 | −701 | −1378 | * | * | | | | | | | | | | | | |
| 151(Y) | −3482 | −2868 | −3701 | −3919 | 238 | −3552 | −1112 | −3000 | −3638 | −2516 | −2526 | −3027 | −3772 | −3101 | −3341 | −3418 | −3527 | −3071 | −441 | 4711 | 157 |
| — | −149 | −500 | 233 | 43 | −381 | 399 | 106 | −626 | 210 | −466 | −720 | 275 | 394 | 45 | 96 | 359 | 117 | −369 | −294 | −249 | |
| — | −16 | −7108 | −8150 | −894 | −1115 | −701 | −1378 | * | * | | | | | | | | | | | | |
| 152(G) | −2594 | −2690 | −3304 | −3623 | −4328 | 3747 | −3462 | −4761 | −3953 | −4671 | −4212 | −3320 | −3352 | −3748 | −3779 | −2839 | −2981 | −4004 | −3668 | −4222 | 158 |
| — | −149 | −500 | 233 | 43 | −381 | 399 | 106 | −626 | 210 | −466 | −720 | 275 | 394 | 45 | 96 | 359 | 117 | −369 | −294 | −249 | |
| — | −16 | −7108 | −8150 | −894 | −1115 | −701 | −1378 | * | * | | | | | | | | | | | | |
| 153(G) | −2594 | −2690 | −3304 | −3623 | −4328 | 3747 | −3462 | −4761 | −3953 | −4671 | −4212 | −3320 | −3352 | −3748 | −3779 | −2839 | −2981 | −4004 | −3668 | −4222 | 159 |
| — | −149 | −500 | 233 | 43 | −381 | 399 | 106 | −626 | 210 | −466 | −720 | 275 | 394 | 45 | 96 | 359 | 117 | −369 | −294 | −249 | |
| — | −16 | −7108 | −8150 | −894 | −1115 | −701 | −1378 | * | * | | | | | | | | | | | | |
| 154(T) | −359 | −976 | −2225 | −2229 | −2900 | −1242 | −2074 | −2560 | −2170 | −2875 | −2064 | −1561 | −1958 | −1969 | −2247 | 1110 | 3375 | −1760 | −3152 | −2850 | 160 |
| — | −149 | −500 | 233 | 43 | −381 | 399 | 106 | −626 | 210 | −466 | −720 | 275 | 394 | 45 | 96 | 359 | 117 | −369 | −294 | −249 | |
| — | −16 | −7108 | −8150 | −894 | −1115 | −701 | −1378 | * | * | | | | | | | | | | | | |
| 155(I) | −2091 | −1746 | −3971 | −3840 | −1676 | −3532 | −3289 | 3684 | −3581 | −659 | −693 | −3562 | −3674 | −3445 | −3521 | −3194 | −2146 | 449 | −2877 | −2493 | 161 |
| — | −149 | −500 | 233 | 43 | −381 | 399 | 106 | −626 | 210 | −466 | −720 | 275 | 394 | 45 | 96 | 359 | 117 | −369 | −294 | −249 | |
| — | −16 | −7108 | −8150 | −894 | −1115 | −701 | −1378 | * | * | | | | | | | | | | | | |
| 156(H) | 861 | −1924 | −384 | 1010 | −2260 | −1477 | 1787 | −1974 | 1769 | −1918 | −1022 | −120 | −1566 | 362 | 697 | −417 | −459 | −1557 | −2073 | −1446 | 162 |
| — | −149 | −500 | 233 | 43 | −381 | 399 | 106 | −626 | 210 | −466 | −720 | 275 | 394 | 45 | 96 | 359 | 117 | −369 | −294 | −249 | |
| — | −16 | −7108 | −8150 | −894 | −1115 | −701 | −1378 | * | * | | | | | | | | | | | | |
| 157(P) | −655 | −1502 | −711 | −557 | −2204 | −1463 | 2143 | −2122 | −586 | −2233 | −1445 | −688 | 2941 | −560 | −941 | 855 | −805 | −1657 | −2369 | −1763 | 163 |
| — | −149 | −500 | 233 | 43 | −381 | 399 | 106 | −626 | 210 | −466 | −720 | 275 | 394 | 45 | 96 | 359 | 117 | −369 | −294 | −249 | |
| — | −16 | −7108 | −8150 | −894 | −1115 | −701 | −1378 | * | * | | | | | | | | | | | | |
| 158(G) | −2594 | −2690 | −3304 | −3623 | −4328 | 3747 | −3462 | −4761 | −3953 | −4671 | −4212 | −3320 | −3352 | −3748 | −3779 | −2839 | −2981 | −4004 | −3668 | −4222 | 164 |
| — | −149 | −500 | 233 | 43 | −381 | 399 | 106 | −626 | 210 | −466 | −720 | 275 | 394 | 45 | 96 | 359 | 117 | −369 | −294 | −249 | |
| — | −16 | −7108 | −8150 | −894 | −1115 | −701 | −1378 | * | * | | | | | | | | | | | | |
| 159(H) | −744 | −2193 | −114 | 1118 | −2513 | −1512 | 2486 | −2252 | 1178 | −2183 | −1308 | 2230 | −1689 | 180 | −233 | −598 | −687 | −1823 | −2335 | −1670 | 165 |
| — | −149 | −500 | 233 | 43 | −381 | 399 | 106 | −626 | 210 | −466 | −720 | 275 | 394 | 45 | 96 | 359 | 117 | −369 | −294 | −249 | |
| — | −16 | −7108 | −8150 | −894 | −1115 | −701 | −1378 | * | * | | | | | | | | | | | | |
| 160(W) | −2672 | −2139 | −3850 | −3748 | 941 | −3611 | −469 | −1691 | −3306 | 1047 | −1217 | −2551 | −3534 | −2514 | −2960 | −2788 | −2577 | −1799 | 4205 | 3466 | 166 |
| — | −149 | −500 | 233 | 43 | −381 | 399 | 106 | −626 | 210 | −466 | −720 | 275 | 394 | 45 | 96 | 359 | 117 | −369 | −294 | −249 | |
| — | −16 | −7108 | −8150 | −894 | −1115 | −701 | −1378 | * | * | | | | | | | | | | | | |
| 161(K) | 386 | −1981 | 779 | 279 | −2295 | −1403 | −114 | −2043 | 2059 | −1991 | −1082 | 941 | −1536 | 1263 | −211 | −384 | −457 | −1602 | −2161 | −1476 | 167 |
| — | −149 | −500 | 233 | 43 | −381 | 399 | 106 | −626 | 210 | −466 | −720 | 275 | 394 | 45 | 96 | 359 | 117 | −369 | −294 | −249 | |
| — | −16 | −7108 | −8150 | −894 | −1115 | −701 | −1378 | * | * | | | | | | | | | | | | |
| 162(G) | −2594 | −2690 | −3304 | −3623 | −4328 | 3747 | −3462 | −4761 | −3953 | −4671 | −4212 | −3320 | −3352 | −3748 | −3779 | −2839 | −2981 | −4004 | −3668 | −4222 | 168 |
| — | −149 | −500 | 233 | 43 | −381 | 399 | 106 | −626 | 210 | −466 | −720 | 275 | 394 | 45 | 96 | 359 | 117 | −369 | −294 | −249 | |
| — | −16 | −7108 | −8150 | −894 | −1115 | −701 | −1378 | * | * | | | | | | | | | | | | |
| 163(K) | −1144 | −2365 | −912 | 2048 | −2856 | −1912 | −326 | −2459 | 2267 | −2295 | −1482 | −556 | −1989 | 108 | 1334 | −1013 | −1014 | −2093 | −2324 | −1881 | 169 |
| — | −149 | −500 | 233 | 43 | −381 | 399 | 106 | −626 | 210 | −466 | −720 | 275 | 394 | 45 | 96 | 359 | 117 | −369 | −294 | −249 | |
| — | −16 | −7108 | −8150 | −894 | −1115 | −701 | −1378 | * | * | | | | | | | | | | | | |
| 164(D) | −1091 | −2610 | 2941 | 174 | −2957 | −1527 | −595 | −2750 | 1084 | −2696 | −1877 | −176 | −1885 | −206 | −1006 | 740 | −1098 | −2288 | −2880 | −2105 | 170 |
| — | −149 | −500 | 233 | 43 | −381 | 399 | 106 | −626 | 210 | −466 | −720 | 275 | 394 | 45 | 96 | 359 | 117 | −369 | −294 | −249 | |
| — | −16 | −7108 | −8150 | −894 | −1115 | −701 | −1378 | * | * | | | | | | | | | | | | |
| 165(L) | −2387 | −1922 | −4674 | −4155 | −617 | −4366 | −3250 | 1889 | −3865 | 2650 | 558 | −4023 | −3847 | −3098 | −3586 | −3647 | −2296 | −38 | −2247 | −2224 | 171 |
| — | −149 | −500 | 233 | 43 | −381 | 399 | 106 | −626 | 210 | −466 | −720 | 275 | 394 | 45 | 96 | 359 | 117 | −369 | −294 | −249 | |
| — | −16 | −7108 | −8150 | −894 | −1115 | −701 | −1378 | * | * | | | | | | | | | | | | |
| 166(N) | −1021 | −2427 | 1806 | 133 | −2870 | −1499 | −635 | −2647 | −521 | −2640 | −1825 | 2171 | −1874 | −255 | −1124 | −860 | 2122 | −2184 | −2853 | −2090 | 172 |
| — | −149 | −500 | 233 | 43 | −381 | 399 | 106 | −626 | 210 | −466 | −720 | 275 | 394 | 45 | 96 | 359 | 117 | −369 | −294 | −249 | |
| — | −16 | −7108 | −8150 | −894 | −1115 | −701 | −1378 | * | * | | | | | | | | | | | | |
| 167(I) | −1830 | −1390 | −4327 | −3873 | −1210 | −3994 | −3274 | 2967 | −3678 | 1259 | −30 | −3633 | −3730 | −3283 | −3604 | −3249 | −1791 | 1570 | −2661 | −2417 | 173 |
| — | −149 | −500 | 233 | 43 | −381 | 399 | 106 | −626 | 210 | −466 | −720 | 275 | 394 | 45 | 96 | 359 | 117 | −369 | −294 | −249 | |
| — | −16 | −7108 | −8150 | −894 | −1115 | −701 | −1378 | * | * | | | | | | | | | | | | |
| 168(V) | −1771 | −1603 | −3750 | −3689 | −2037 | −3050 | −3231 | 403 | −3479 | −1154 | −1076 | −3246 | −3399 | −3383 | −3437 | −2628 | −1917 | 3536 | −3074 | −2677 | 174 |
| — | −149 | −500 | 233 | 43 | −381 | 399 | 106 | −626 | 210 | −466 | −720 | 275 | 394 | 45 | 96 | 359 | 117 | −369 | −294 | −249 | |
| — | −16 | −7108 | −8150 | −894 | −1115 | −701 | −1378 | * | * | | | | | | | | | | | | |
| 169(S) | −897 | −1462 | −2333 | −2543 | −3185 | −1640 | −2474 | −3294 | −2686 | −3497 | −2780 | −1973 | −2360 | −2483 | −2703 | 3465 | −1316 | −2413 | −3310 | −3025 | 175 |
| — | −149 | −500 | 233 | 43 | −381 | 399 | 106 | −626 | 210 | −466 | −720 | 275 | 394 | 45 | 96 | 359 | 117 | −369 | −294 | −249 | |
| — | −16 | −7108 | −8150 | −894 | −1115 | −701 | −1378 | * | * | | | | | | | | | | | | |
| 170(A) | 2440 | −824 | −2371 | −2082 | −1993 | −1344 | −1704 | −1264 | −1899 | −1832 | −1137 | −1517 | −1946 | −1674 | −2005 | 1075 | −641 | 1474 | −2390 | −2055 | 176 |
| — | −149 | −500 | 233 | 43 | −381 | 399 | 106 | −626 | 210 | −466 | −720 | 275 | 394 | 45 | 96 | 359 | 117 | −369 | −294 | −249 | |
| — | −16 | −7108 | −8150 | −894 | −1115 | −701 | −1378 | * | * | | | | | | | | | | | | |
| 171(F) | −3342 | −2776 | −4026 | −4232 | 4354 | −3545 | −1431 | −2315 | −4038 | −1801 | −1900 | −3299 | −3780 | −3350 | −3645 | −3490 | −3420 | −2566 | −739 | 349 | 177 |
| — | −149 | −500 | 233 | 43 | −381 | 399 | 106 | −626 | 210 | −466 | −720 | 275 | 394 | 45 | 96 | 359 | 117 | −369 | −294 | −249 | |
| — | −16 | −7108 | −8150 | −894 | −1115 | −701 | −1378 | * | * | | | | | | | | | | | | |
| 172(E) | −2641 | −3308 | −896 | 3732 | −3966 | −2458 | −2043 | −4105 | −2128 | −4016 | −3555 | −1531 | −2959 | −1842 | −2560 | −2479 | −2750 | −3722 | −3563 | −3385 | 178 |
| — | −149 | −500 | 233 | 43 | −381 | 399 | 106 | −626 | 210 | −466 | −720 | 275 | 394 | 45 | 96 | 359 | 117 | −369 | −294 | −249 | |
| — | −16 | −7108 | −8150 | −894 | −1115 | −701 | −1378 | * | * | | | | | | | | | | | | |
| 173(A) | 2966 | −1031 | −2429 | −2551 | −3222 | 1544 | −2368 | −2934 | −2633 | −3225 | −2377 | −1727 | −2028 | −2309 | −2637 | −656 | −850 | −1980 | −3412 | −3224 | 179 |
| — | −149 | −500 | 233 | 43 | −381 | 399 | 106 | −626 | 210 | −466 | −720 | 275 | 394 | 45 | 96 | 359 | 117 | −369 | −294 | −249 | |
| — | −16 | −7108 | −8150 | −894 | −1115 | −701 | −1378 | * | * | | | | | | | | | | | | |
| 174(V) | −1769 | −1342 | −4255 | −3793 | −1216 | −3901 | −3162 | 1633 | −3589 | 1486 | −51 | −3537 | −3667 | −3214 | −3518 | −3143 | −1731 | 2692 | −2609 | −2345 | 180 |
| — | −149 | −500 | 233 | 43 | −381 | 399 | 106 | −626 | 210 | −466 | −720 | 275 | 394 | 45 | 96 | 359 | 117 | −369 | −294 | −249 | |
| — | −16 | −7108 | −8150 | −894 | −1115 | −701 | −1378 | * | * | | | | | | | | | | | | |
| 175(G) | −2594 | −2690 | −3304 | −3623 | −4328 | 3747 | −3462 | −4761 | −3953 | −4671 | −4212 | −3320 | −3352 | −3748 | −3779 | −2839 | −2981 | −4004 | −3668 | −4222 | 181 |
| — | −149 | −500 | 233 | 43 | −381 | 399 | 106 | −626 | 210 | −466 | −720 | 275 | 394 | 45 | 96 | 359 | 117 | −369 | −294 | −249 | |
| — | −16 | −7108 | −8150 | −894 | −1115 | −701 | −1378 | * | * | | | | | | | | | | | | |
| 176(Q) | −729 | −2116 | −413 | 1096 | −2484 | −1587 | 1599 | −2186 | 1695 | −2094 | −1219 | −223 | −1698 | 2418 | 90 | −599 | −649 | −1770 | −2213 | −1615 | 182 |
| — | −149 | −500 | 233 | 43 | −381 | 399 | 106 | −626 | 210 | −466 | −720 | 275 | 394 | 45 | 96 | 359 | 117 | −369 | −294 | −249 | |
| — | −16 | −7108 | −8150 | −894 | −1115 | −701 | −1378 | * | * | | | | | | | | | | | | |
| 177(W) | −1652 | −1707 | −2340 | −1879 | 1996 | −2733 | 2013 | −1398 | 1758 | −1386 | −938 | −1641 | −2751 | −1364 | −1762 | −1780 | −1577 | −1325 | 3577 | 2136 | 183 |
| — | −149 | −500 | 233 | 43 | −381 | 399 | 106 | −626 | 210 | −466 | −720 | 275 | 394 | 45 | 96 | 359 | 117 | −369 | −294 | −249 | |
| — | −16 | −7108 | −8150 | −894 | −1115 | −701 | −1378 | * | * | | | | | | | | | | | | |
| 178(T) | −421 | −753 | −1251 | −704 | −846 | −1670 | −535 | 894 | −548 | −690 | −1 | 1376 | −1791 | −421 | −846 | 373 | 1461 | 858 | −1236 | −812 | 184 |
| — | −149 | −500 | 233 | 43 | −381 | 399 | 106 | −626 | 210 | −466 | −720 | 275 | 394 | 45 | 96 | 359 | 117 | −369 | −294 | −249 | |
| — | −16 | −7108 | −8150 | −894 | −1115 | −701 | −1378 | * | * | | | | | | | | | | | | |
| 179(H) | 1498 | −1593 | −504 | 15 | −1895 | −1484 | 2279 | −1559 | 1119 | −1640 | −810 | −242 | −1611 | 194 | −171 | −462 | 815 | −1231 | −1914 | −1340 | 185 |
| — | −149 | −500 | 233 | 43 | −381 | 399 | 106 | −626 | 210 | −466 | −720 | 275 | 394 | 45 | 96 | 359 | 117 | −369 | −294 | −249 | |
| — | −16 | −7108 | −8150 | −894 | −1115 | −701 | −1378 | * | * | | | | | | | | | | | | |
| 180(G) | −1515 | −2130 | −1298 | −1450 | −2658 | 3285 | 2212 | −3276 | −1691 | −3291 | −2638 | −1524 | −2562 | −1662 | −1925 | −1600 | −1764 | −2713 | −2804 | −2234 | 186 |
| — | −149 | −500 | 233 | 43 | −381 | 399 | 106 | −626 | 210 | −466 | −720 | 275 | 394 | 45 | 96 | 359 | 117 | −369 | −294 | −249 | |
| — | −16 | −7108 | −8150 | −894 | −1115 | −701 | −1378 | * | * | | | | | | | | | | | | |
| 181(K) | −528 | −2010 | 1346 | 1082 | −2329 | −1408 | −118 | −2080 | 1475 | −2018 | −1108 | 1161 | −1543 | 331 | 1052 | −394 | −471 | −1632 | −2181 | −1494 | 187 |
| — | −149 | −500 | 233 | 43 | −381 | 399 | 106 | −626 | 210 | −466 | −720 | 275 | 394 | 45 | 96 | 359 | 117 | −369 | −294 | −249 | |
| — | −16 | −7108 | −8150 | −894 | −1115 | −701 | −1378 | * | * | | | | | | | | | | | | |
| 182(M) | −1894 | −1521 | −4170 | −3679 | −840 | −3793 | −2866 | 2827 | −3360 | 375 | 3445 | −3437 | −3555 | −2902 | −3223 | −3028 | −1846 | 470 | −2249 | −2059 | 188 |
| — | −149 | −500 | 233 | 43 | −381 | 399 | 106 | −626 | 210 | −466 | −720 | 275 | 394 | 45 | 96 | 359 | 117 | −369 | −294 | −249 | |
| — | −16 | −7108 | −8150 | −894 | −1115 | −701 | −1378 | * | * | | | | | | | | | | | | |
| 183(T) | −670 | −1758 | 1731 | −141 | −2591 | −1399 | −691 | −2319 | −499 | −2384 | −1543 | −387 | −1786 | −316 | −1016 | 1576 | 2044 | −1811 | −2624 | −1981 | 189 |
| — | −149 | −500 | 233 | 43 | −381 | 399 | 106 | −626 | 210 | −466 | −720 | 275 | 394 | 45 | 96 | 359 | 117 | −369 | −294 | −249 | |
| — | −16 | −7108 | −8150 | −894 | −1115 | −701 | −1378 | * | * | | | | | | | | | | | | |
| 184(E) | 345 | −2074 | 925 | 1994 | −2378 | −1408 | −177 | −2135 | 922 | −2084 | −1183 | −38 | 641 | 264 | −356 | −444 | −536 | −1690 | −2261 | −1556 | 190 |
| — | −149 | −500 | 233 | 43 | −381 | 399 | 106 | −626 | 210 | −466 | −720 | 275 | 394 | 45 | 96 | 359 | 117 | −369 | −294 | −249 | |
| — | −16 | −7108 | −8150 | −894 | −1115 | −701 | −1378 | * | * | | | | | | | | | | | | |
| 185(E) | −1493 | −2900 | 93 | 3174 | −2903 | −1743 | 1987 | −3042 | −646 | −2957 | −2238 | −411 | −2146 | −506 | −1121 | −1272 | −1503 | −2629 | −2905 | −2134 | 191 |
| — | −149 | −500 | 233 | 43 | −381 | 399 | 106 | −626 | 210 | −466 | −720 | 275 | 394 | 45 | 96 | 359 | 117 | −369 | −294 | −249 | |
| — | −16 | −7108 | −8150 | −894 | −1115 | −701 | −1378 | * | * | | | | | | | | | | | | |
| 186(D) | −1293 | −2959 | 2673 | 2121 | −3219 | −1546 | −713 | −3043 | −707 | −2974 | −2191 | −158 | −1967 | −342 | −1394 | −1043 | 701 | −2567 | −3172 | −2311 | 192 |
| — | −149 | −500 | 233 | 43 | −381 | 399 | 106 | −626 | 210 | −466 | −720 | 275 | 394 | 45 | 96 | 359 | 117 | −369 | −294 | −249 | |
| — | −16 | −7108 | −8150 | −894 | −1115 | −701 | −1378 | * | * | | | | | | | | | | | | |
| 187(F) | −1137 | −905 | −3250 | −2707 | 2365 | −2647 | −1016 | −34 | −2336 | 1239 | 267 | −2150 | −2626 | −1861 | −2133 | −1752 | −1069 | 1461 | −599 | 1844 | 193 |
| — | −149 | −500 | 233 | 43 | −381 | 399 | 106 | −626 | 210 | −466 | −720 | 275 | 394 | 45 | 96 | 359 | 117 | −369 | −294 | −249 | |
| — | −16 | −7108 | −8150 | −894 | −1115 | −701 | −1378 | * | * | | | | | | | | | | | | |
| 188(K) | −479 | −1713 | −409 | 1031 | −1925 | −1467 | 1755 | −1650 | 1844 | −349 | −827 | −140 | −1556 | 319 | −75 | −403 | −411 | −1301 | −1900 | 843 | 194 |
| — | −149 | −500 | 233 | 43 | −381 | 399 | 106 | −626 | 210 | −466 | −720 | 275 | 394 | 45 | 96 | 359 | 117 | −369 | −294 | −249 | |
| — | −16 | −7108 | −8150 | −894 | −1115 | −701 | −1378 | * | * | | | | | | | | | | | | |
| 189(G) | 433 | −2144 | 52 | 1047 | −2717 | 2303 | −615 | −2467 | −442 | −2482 | −1655 | 1123 | −1828 | −233 | −995 | −763 | −923 | −2000 | −2710 | −2005 | 195 |
| — | −149 | −500 | 233 | 43 | −381 | 399 | 106 | −626 | 210 | −466 | −720 | 275 | 394 | 45 | 96 | 359 | 117 | −369 | −294 | −249 | |
| — | −16 | −7108 | −8150 | −894 | −1115 | −701 | −1378 | * | * | | | | | | | | | | | | |
| 190(V) | −1752 | −1320 | −4254 | −3806 | −1311 | −3916 | −3232 | 1701 | −3614 | 1188 | −140 | −3551 | −3693 | −3280 | −3568 | −3166 | −1718 | 2833 | −2703 | −2409 | 196 |
| — | −149 | −500 | 233 | 43 | −381 | 399 | 106 | −626 | 210 | −466 | −720 | 275 | 394 | 45 | 96 | 359 | 117 | −369 | −294 | −249 | |
| — | −16 | −7108 | −8150 | −894 | −1115 | −701 | −1378 | * | * | | | | | | | | | | | | |
| 191(E) | −1199 | −1750 | −734 | 2668 | −1820 | −2038 | −1068 | 1892 | −867 | −1273 | −897 | −922 | −2295 | −797 | −1238 | −1340 | −1197 | −426 | −2325 | −1789 | 197 |
| — | −149 | −500 | 233 | 43 | −381 | 399 | 106 | −626 | 210 | −466 | −720 | 275 | 394 | 45 | 96 | 359 | 117 | −369 | −294 | −249 | |
| — | −16 | −7108 | −8150 | −894 | −1115 | −701 | −1378 | * | * | | | | | | | | | | | | |
| 192(C) | −1182 | 3528 | −1398 | −620 | −2541 | −2038 | −358 | −2093 | 1181 | −2037 | −1272 | −747 | −2070 | 1553 | 2213 | −1123 | −1038 | −1817 | −2142 | −1774 | 198 |
| — | −149 | −500 | 233 | 43 | −381 | 399 | 106 | −626 | 210 | −466 | −720 | 275 | 394 | 45 | 96 | 359 | 117 | −369 | −294 | −249 | |
| — | −16 | −7108 | −8150 | −894 | −1115 | −701 | −1378 | * | * | | | | | | | | | | | | |
| 193(N) | −1478 | −2527 | −261 | −403 | −2011 | −1837 | 2032 | −2925 | −735 | −2845 | −2195 | 3635 | −2259 | −721 | −1085 | −1352 | −1546 | −2522 | −2307 | −1431 | 199 |
| — | −149 | −500 | 233 | 43 | −381 | 399 | 106 | −626 | 210 | −466 | −720 | 275 | 394 | 45 | 96 | 359 | 117 | −369 | −294 | −249 | |
| — | −16 | −7108 | −8150 | −894 | −1115 | −701 | −1378 | * | * | | | | | | | | | | | | |
| 194(A) | 3438 | −1472 | −2846 | −3040 | −3287 | −1726 | −2735 | −2840 | −3028 | −3257 | −2662 | −2236 | −2447 | −2798 | −2944 | −1216 | −1387 | −2183 | −3405 | −3320 | 200 |
| — | −149 | −500 | 233 | 43 | −381 | 399 | 106 | −626 | 210 | −466 | −720 | 275 | 394 | 45 | 96 | 359 | 117 | −369 | −294 | −249 | |
| — | −16 | −7108 | −8150 | −894 | −1115 | −701 | −1378 | * | * | | | | | | | | | | | | |
| 195(C) | −1220 | 4911 | −3609 | −3314 | −1440 | −2525 | −2482 | 1565 | −2922 | −706 | −544 | −2678 | −2896 | −2710 | −2836 | −1869 | −1375 | 379 | −2371 | −1957 | 201 |
| — | −149 | −500 | 233 | 43 | −381 | 399 | 106 | −626 | 210 | −466 | −720 | 275 | 394 | 45 | 96 | 359 | 117 | −369 | −294 | −249 | |
| — | −16 | −7108 | −8150 | −894 | −1115 | −701 | −1378 | * | * | | | | | | | | | | | | |
| 196(P) | −2931 | −2878 | −3420 | −3706 | −4181 | −2925 | −3468 | −4621 | −3859 | −4490 | −4165 | −3491 | 4225 | −3781 | −3695 | −3182 | −3279 | −4087 | −3594 | −4064 | 202 |
| — | −149 | −500 | 233 | 43 | −381 | 399 | 106 | −626 | 210 | −466 | −720 | 275 | 394 | 45 | 96 | 359 | 117 | −369 | −294 | −249 | |
| — | −16 | −7108 | −8150 | −894 | −1115 | −701 | −1378 | * | * | | | | | | | | | | | | |
| 197(G) | −477 | −1115 | −1983 | −2189 | −3315 | 3154 | −2272 | −3172 | −2506 | −3387 | −2522 | −1599 | −2042 | −2177 | −2583 | 1217 | −905 | −2130 | −3477 | −3225 | 203 |
| — | −149 | −500 | 233 | 43 | −381 | 399 | 106 | −626 | 210 | −466 | −720 | 275 | 394 | 45 | 96 | 359 | 117 | −369 | −294 | −249 | |
| — | −16 | −7108 | −8150 | −894 | −1115 | −701 | −1378 | * | * | | | | | | | | | | | | |
| 198(A) | 1653 | −1347 | −705 | −249 | −1969 | −1385 | −477 | −1629 | −159 | −1759 | −935 | −434 | 1285 | 1404 | −586 | −450 | 1019 | −1243 | −2070 | −1522 | 204 |
| — | −149 | −500 | 233 | 43 | −381 | 399 | 106 | −626 | 210 | −466 | −720 | 275 | 394 | 45 | 96 | 359 | 117 | −369 | −294 | −249 | |
| — | −16 | −7108 | −8150 | −894 | −1115 | −701 | −1378 | * | * | | | | | | | | | | | | |
| 199(G) | −2594 | −2690 | −3304 | −3623 | −4328 | 3747 | −3462 | −4761 | −3953 | −4671 | −4212 | −3320 | −3352 | −3748 | −3779 | −2839 | −2981 | −4004 | −3668 | −4222 | 205 |
| — | −149 | −500 | 233 | 43 | −381 | 399 | 106 | −626 | 210 | −466 | −720 | 275 | 394 | 45 | 96 | 359 | 117 | −369 | −294 | −249 | |
| — | −16 | −7108 | −8150 | −894 | −1115 | −701 | −1378 | * | * | | | | | | | | | | | | |
| 200(S) | 1870 | −938 | −2270 | −2183 | −3068 | 1488 | −2056 | −2810 | −2168 | −3032 | −2144 | −1511 | −1898 | −1901 | −2300 | 2236 | −690 | −1857 | −3265 | −2990 | 206 |
| — | −149 | −500 | 233 | 43 | −381 | 399 | 106 | −626 | 210 | −466 | −720 | 275 | 394 | 45 | 96 | 359 | 117 | −369 | −294 | −249 | |
| — | −16 | −7108 | −8150 | −894 | −1115 | −701 | −1378 | * | * | | | | | | | | | | | | |
| 201(C) | −2476 | 5735 | −4102 | −4358 | −3712 | −2763 | −3545 | −3518 | −4167 | −3859 | −3569 | −3631 | −3363 | −4030 | −3832 | −2793 | −2860 | −3158 | −3464 | −3718 | 207 |
| — | −149 | −500 | 233 | 43 | −381 | 399 | 106 | −626 | 210 | −466 | −720 | 275 | 394 | 45 | 96 | 359 | 117 | −369 | −294 | −249 | |
| — | −16 | −7108 | −8150 | −894 | −1115 | −701 | −1378 | * | * | | | | | | | | | | | | |
| 202(G) | −2594 | −2690 | −3304 | −3623 | −4328 | 3747 | −3462 | −4761 | −3953 | −4671 | −4212 | −3320 | −3352 | −3748 | −3779 | −2839 | −2981 | −4004 | −3668 | −4222 | 208 |
| — | −149 | −500 | 233 | 43 | −381 | 399 | 106 | −626 | 210 | −466 | −720 | 275 | 394 | 45 | 96 | 359 | 117 | −369 | −294 | −249 | |
| — | −16 | −7108 | −8150 | −894 | −1115 | −701 | −1378 | * | * | | | | | | | | | | | | |
| 203(G) | −2594 | −2690 | −3304 | −3623 | −4328 | 3747 | −3462 | −4761 | −3953 | −4671 | −4212 | −3320 | −3352 | −3748 | −3779 | −2839 | −2981 | −4004 | −3668 | −4222 | 209 |
| — | −149 | −500 | 233 | 43 | −381 | 399 | 106 | −626 | 210 | −466 | −720 | 275 | 394 | 45 | 96 | 359 | 117 | −369 | −294 | −249 | |
| — | −16 | −7108 | −8150 | −894 | −1115 | −701 | −1378 | * | * | | | | | | | | | | | | |
| 204(M) | −2406 | −2296 | −3638 | −3594 | −1525 | −3105 | −2824 | −1047 | −3121 | −596 | 5043 | −3293 | −3425 | −3046 | −2996 | −2911 | −2552 | −1398 | −2513 | −2207 | 210 |
| — | −149 | −500 | 233 | 43 | −381 | 399 | 106 | −626 | 210 | −466 | −720 | 275 | 394 | 45 | 96 | 359 | 117 | −369 | −294 | −249 | |
| — | −16 | −7108 | −8150 | −894 | −1115 | −701 | −1378 | * | * | | | | | | | | | | | | |
| 205(Y) | −3590 | −2700 | −4146 | −4379 | 2092 | −4028 | −404 | −2517 | −3963 | −1928 | −1973 | −2744 | −3921 | −2845 | −3431 | −3284 | −3474 | −2669 | 336 | 4423 | 211 |
| — | −149 | −500 | 233 | 43 | −381 | 399 | 106 | −626 | 210 | −466 | −720 | 275 | 394 | 45 | 96 | 359 | 117 | −369 | −294 | −249 | |
| — | −16 | −7108 | −8150 | −894 | −1115 | −701 | −1378 | * | * | | | | | | | | | | | | |
| 206(T) | −1213 | −1674 | −2755 | −2906 | −3163 | −1922 | −2659 | −2698 | −2788 | −3105 | −2612 | −2311 | −2600 | −2708 | −2753 | −1463 | 3819 | −2197 | −3286 | −3156 | 212 |
| — | −149 | −500 | 233 | 43 | −381 | 399 | 106 | −626 | 210 | −466 | −720 | 275 | 394 | 45 | 96 | 359 | 117 | −369 | −294 | −249 | |
| — | −16 | −7108 | −8150 | −894 | −1115 | −701 | −1378 | * | * | | | | | | | | | | | | |
| 207(A) | 3438 | −1472 | −2846 | −3040 | −3287 | −1726 | −2735 | −2840 | −3028 | −3257 | −2662 | −2236 | −2447 | −2798 | −2944 | −1216 | −1387 | −2183 | −3405 | −3320 | 213 |
| — | −149 | −500 | 233 | 43 | −381 | 399 | 106 | −626 | 210 | −466 | −720 | 275 | 394 | 45 | 96 | 359 | 117 | −369 | −294 | −249 | |
| — | −16 | −7108 | −8150 | −894 | −1115 | −701 | −1378 | * | * | | | | | | | | | | | | |
| 208(N) | −2171 | −2655 | −1458 | −1748 | −3334 | −2364 | −2267 | −3943 | −2365 | −3936 | −3437 | 4205 | −2932 | −2205 | −2608 | −2224 | −2439 | −3392 | −3253 | −2909 | 214 |
| — | −149 | −500 | 233 | 43 | −381 | 399 | 106 | −626 | 210 | −466 | −720 | 275 | 394 | 45 | 96 | 359 | 117 | −369 | −294 | −249 | |
| — | −16 | −7108 | −8150 | −894 | −1115 | −701 | −1378 | * | * | | | | | | | | | | | | |
| 209(T) | −1213 | −1674 | −2755 | −2906 | −3163 | −1922 | −2659 | −2698 | −2788 | −3105 | −2612 | −2311 | −2600 | −2708 | −2753 | −1463 | 3819 | −2197 | −3286 | −3156 | 215 |
| — | −149 | −500 | 233 | 43 | −381 | 399 | 106 | −626 | 210 | −466 | −720 | 275 | 394 | 45 | 96 | 359 | 117 | −369 | −294 | −249 | |
| — | −16 | −7108 | −8150 | −894 | −1115 | −701 | −1378 | * | * | | | | | | | | | | | | |
| 210(M) | −2355 | −1988 | −4343 | −3834 | −504 | −4051 | −2868 | 105 | −3385 | 1451 | 4460 | −3680 | −3671 | −2806 | −3171 | −3327 | −2274 | −474 | −2039 | −1925 | 216 |
| — | −149 | −500 | 233 | 43 | −381 | 399 | 106 | −626 | 210 | −466 | −720 | 275 | 394 | 45 | 96 | 359 | 117 | −369 | −294 | −249 | |
| — | −16 | −7108 | −8150 | −894 | −1115 | −701 | −1378 | * | * | | | | | | | | | | | | |
| 211(S) | 2150 | −939 | −2407 | −2415 | −3075 | −1197 | −2205 | −2781 | −2384 | −3065 | −2205 | −1613 | −1936 | −2105 | −2436 | 2652 | −729 | −1850 | −3306 | −3049 | 217 |
| — | −149 | −500 | 233 | 43 | −381 | 399 | 106 | −626 | 210 | −466 | −720 | 275 | 394 | 45 | 96 | 359 | 117 | −369 | −294 | −249 | |
| — | −16 | −7108 | −8150 | −894 | −1115 | −701 | −1378 | * | * | | | | | | | | | | | | |
| 212(S) | −344 | −979 | −2190 | −2162 | −2959 | −1227 | −2042 | −2651 | −2116 | −2934 | −2100 | −1526 | −1941 | −1909 | −2222 | 2940 | 1775 | −1804 | −3187 | −2882 | 218 |
| — | −149 | −500 | 233 | 43 | −381 | 399 | 106 | −626 | 210 | −466 | −720 | 275 | 394 | 45 | 96 | 359 | 117 | −369 | −294 | −249 | |
| — | −16 | −7108 | −8150 | −894 | −1115 | −701 | −1378 | * | * | | | | | | | | | | | | |
| 213(A) | 3048 | −932 | −2480 | −2533 | −3075 | −1200 | −2274 | −2765 | −2501 | −3071 | −2221 | −1658 | −1948 | −2205 | −2512 | 1225 | −739 | −1842 | −3322 | −3078 | 219 |
| — | −149 | −500 | 233 | 43 | −381 | 399 | 106 | −626 | 210 | −466 | −720 | 275 | 394 | 45 | 96 | 359 | 117 | −369 | −294 | −249 | |
| — | −16 | −7108 | −8150 | −894 | −1115 | −701 | −1378 | * | * | | | | | | | | | | | | |
| 214(I) | −1924 | −1546 | −4067 | −3658 | 2312 | −3663 | −2081 | 3030 | −3367 | 150 | 99 | −3197 | −3492 | −2821 | −3179 | −2894 | −1877 | 293 | −1445 | −692 | 220 |
| — | −149 | −500 | 233 | 43 | −381 | 399 | 106 | −626 | 210 | −466 | −720 | 275 | 394 | 45 | 96 | 359 | 117 | −369 | −294 | −249 | |
| — | −16 | −7108 | −8150 | −894 | −1115 | −701 | −1378 | * | * | | | | | | | | | | | | |
| 215(E) | −2641 | −3308 | −896 | 3732 | −3966 | −2458 | −2043 | −4105 | −2128 | −4016 | −3555 | −1531 | −2959 | −1842 | −2560 | −2479 | −2750 | −3722 | −3563 | −3385 | 221 |
| — | −149 | −500 | 233 | 43 | −381 | 399 | 106 | −626 | 210 | −466 | −720 | 275 | 394 | 45 | 96 | 359 | 117 | −369 | −294 | −249 | |
| — | −16 | −7108 | −8150 | −894 | −1115 | −701 | −1378 | * | * | | | | | | | | | | | | |
| 216(A) | 2389 | −814 | −2506 | −2162 | −1696 | −1545 | −1698 | −499 | −1942 | −1398 | −813 | −1640 | −2076 | −1723 | −2027 | −806 | 1148 | 1559 | −2200 | −1856 | 222 |
| — | −149 | −500 | 233 | 43 | −381 | 399 | 106 | −626 | 210 | −466 | −720 | 275 | 394 | 45 | 96 | 359 | 117 | −369 | −294 | −249 | |
| — | −16 | −7108 | −8150 | −894 | −1115 | −701 | −1378 | * | * | | | | | | | | | | | | |
| 217(M) | −2576 | −2118 | −4725 | −4165 | −461 | −4430 | −3165 | 99 | −3811 | 2513 | 3454 | −4075 | −3839 | −2978 | −3488 | −3704 | −2457 | −591 | −2111 | −2145 | 223 |
| — | −149 | −500 | 233 | 43 | −381 | 399 | 106 | −626 | 210 | −466 | −720 | 275 | 394 | 45 | 96 | 359 | 117 | −369 | −294 | −249 | |
| — | −16 | −7108 | −8150 | −894 | −1115 | −701 | −1378 | * | * | | | | | | | | | | | | |
| 218(G) | −2594 | −2690 | −3304 | −3623 | −4328 | 3747 | −3462 | −4761 | −3953 | −4671 | −4212 | −3320 | −3352 | −3748 | −3779 | −2839 | −2981 | −4004 | −3668 | −4222 | 224 |
| — | −149 | −500 | 233 | 43 | −381 | 399 | 106 | −626 | 210 | −466 | −720 | 275 | 394 | 45 | 96 | 359 | 117 | −369 | −294 | −249 | |
| — | −16 | −7108 | −8150 | −894 | −1115 | −701 | −1378 | * | * | | | | | | | | | | | | |
| 219(M) | −2313 | −1968 | −4258 | −3765 | −518 | −3966 | −2806 | 98 | −3289 | 1292 | 4523 | −3599 | −3636 | −2769 | −3097 | −3249 | −2243 | −457 | −2026 | −1874 | 225 |
| — | −149 | −500 | 233 | 43 | −381 | 399 | 106 | −626 | 210 | −466 | −720 | 275 | 394 | 45 | 96 | 359 | 117 | −369 | −294 | −249 | |
| — | −16 | −7108 | −8150 | −894 | −1115 | −701 | −1378 | * | * | | | | | | | | | | | | |
| 220(S) | −897 | −1462 | −2333 | −2543 | −3185 | −1640 | −2474 | −3294 | −2686 | −3497 | −2780 | −1973 | −2360 | −2483 | −2703 | 3465 | −1316 | −2413 | −3310 | −3025 | 226 |
| — | −149 | −500 | 233 | 43 | −381 | 399 | 106 | −626 | 210 | −466 | −720 | 275 | 394 | 45 | 96 | 359 | 117 | −369 | −294 | −249 | |
| — | −16 | −7108 | −8150 | −894 | −1115 | −701 | −1378 | * | * | | | | | | | | | | | | |
| 221(L) | −2631 | −2159 | −4786 | −4228 | −462 | −4506 | −3231 | 96 | −3878 | 2828 | 2482 | −4157 | −3880 | −3016 | −3541 | −3793 | −2509 | −608 | −2134 | −2182 | 227 |
| — | −149 | −500 | 233 | 43 | −381 | 399 | 106 | −626 | 210 | −466 | −720 | 275 | 394 | 45 | 96 | 359 | 117 | −369 | −294 | −249 | |
| — | −16 | −7108 | −8150 | −894 | −1115 | −701 | −1378 | * | * | | | | | | | | | | | | |
| 222(P) | −1501 | −1778 | −2473 | −2371 | −1710 | −2311 | −2045 | −1321 | −2060 | 827 | −1068 | −2173 | 3594 | −2082 | −2130 | −1799 | −1699 | −1373 | −2373 | −1942 | 228 |
| — | −149 | −500 | 233 | 43 | −381 | 399 | 106 | −626 | 210 | −466 | −720 | 275 | 394 | 45 | 96 | 359 | 117 | −369 | −294 | −249 | |
| — | −16 | −7108 | −8150 | −894 | −1115 | −701 | −1378 | * | * | | | | | | | | | | | | |
| 223(Y) | −1068 | −1670 | −865 | −836 | −631 | 1198 | −767 | −1828 | −1059 | −1914 | −1304 | 692 | −2203 | −906 | −1387 | −1136 | −1163 | −1566 | −1185 | 3670 | 229 |
| — | −149 | −500 | 233 | 43 | −381 | 399 | 106 | −626 | 210 | −466 | −720 | 275 | 394 | 45 | 96 | 359 | 117 | −369 | −294 | −249 | |
| — | −16 | −7108 | −8150 | −894 | −1115 | −701 | −1378 | * | * | | | | | | | | | | | | |
| 224(S) | −897 | −1462 | −2333 | −2543 | −3185 | −1640 | −2474 | −3294 | −2686 | −3497 | −2780 | −1973 | −2360 | −2483 | −2703 | 3465 | −1316 | −2413 | −3310 | −3025 | 230 |
| — | −149 | −500 | 233 | 43 | −381 | 399 | 106 | −626 | 210 | −466 | −720 | 275 | 394 | 45 | 96 | 359 | 117 | −369 | −294 | −249 | |
| — | −16 | −7108 | −8150 | −894 | −1115 | −701 | −1378 | * | * | | | | | | | | | | | | |
| 225(S) | 1172 | −954 | −2367 | −2422 | −3120 | −1204 | −2237 | −2835 | −2426 | −3122 | −2265 | −1621 | −1948 | −2145 | −2467 | 3107 | −749 | −1884 | −3349 | −3092 | 231 |
| — | −149 | −500 | 233 | 43 | −381 | 399 | 106 | −626 | 210 | −466 | −720 | 275 | 394 | 45 | 96 | 359 | 117 | −369 | −294 | −249 | |
| — | −16 | −7108 | −8150 | −894 | −1115 | −701 | −1378 | * | * | | | | | | | | | | | | |
| 226(S) | −342 | −975 | −2176 | −2124 | −2912 | −1229 | −2003 | −2594 | −2067 | −2878 | −2048 | −1510 | −1936 | −1866 | −2184 | 2553 | 2492 | −1773 | −3143 | −2833 | 232 |
| — | −149 | −500 | 233 | 43 | −381 | 399 | 106 | −626 | 210 | −466 | −720 | 275 | 394 | 45 | 96 | 359 | 117 | −369 | −294 | −249 | |
| — | −16 | −7108 | −8150 | −894 | −1115 | −701 | −1378 | * | * | | | | | | | | | | | | |
| 227(M) | −720 | −1440 | −710 | −343 | −1228 | −1693 | 2436 | −1209 | −132 | −1364 | 3099 | 1904 | −1852 | −183 | −458 | −776 | −680 | −1004 | −1540 | −890 | 233 |
| — | −149 | −500 | 233 | 43 | −381 | 399 | 106 | −626 | 210 | −466 | −720 | 275 | 394 | 45 | 96 | 359 | 117 | −369 | −294 | −249 | |
| — | −16 | −7108 | −8150 | −894 | −1115 | −701 | −1378 | * | * | | | | | | | | | | | | |
| 228(P) | 2240 | −1100 | −2241 | −2293 | −3037 | −1346 | −2188 | −2683 | −2317 | −2986 | −2210 | −1663 | 3041 | −2093 | −2391 | −722 | −895 | −1893 | −3243 | −2998 | 234 |
| — | −149 | −500 | 233 | 43 | −381 | 399 | 106 | −626 | 210 | −466 | −720 | 275 | 394 | 45 | 96 | 359 | 117 | −369 | −294 | −249 | |
| — | −16 | −7108 | −8150 | −894 | −1115 | −701 | −1378 | * | * | | | | | | | | | | | | |
| 229(A) | 2958 | −1235 | −1299 | −1377 | −2868 | −1345 | −1673 | −2580 | −1661 | −2843 | −2054 | 1555 | −1995 | −1468 | −1921 | −715 | −888 | −1871 | −3064 | −2630 | 235 |
| — | −149 | −500 | 233 | 43 | −381 | 399 | 106 | −626 | 210 | −466 | −720 | 275 | 394 | 45 | 96 | 359 | 117 | −369 | −294 | −249 | |
| — | −16 | −7108 | −8150 | −894 | −1115 | −701 | −1378 | * | * | | | | | | | | | | | | |
| 230(E) | −509 | −1046 | −884 | 1564 | −1116 | −1669 | −441 | −485 | −283 | 250 | −206 | −577 | 689 | −200 | −656 | −670 | −459 | 1290 | −1467 | −995 | 236 |
| — | −149 | −500 | 233 | 43 | −381 | 399 | 106 | −626 | 210 | −466 | −720 | 275 | 394 | 45 | 96 | 359 | 117 | −369 | −294 | −249 | |
| — | −16 | −7108 | −8150 | −894 | −1115 | −701 | −1378 | * | * | | | | | | | | | | | | |
| 231(D) | −1203 | −2412 | 2595 | −117 | −3286 | −1536 | −1057 | −3176 | −1165 | −3186 | −2436 | −428 | −2068 | −736 | −1824 | 2377 | −1366 | −2578 | −3334 | −2552 | 237 |
| — | −149 | −500 | 233 | 43 | −381 | 399 | 106 | −626 | 210 | −466 | −720 | 275 | 394 | 45 | 96 | 359 | 117 | −369 | −294 | −249 | |
| — | −16 | −7108 | −8150 | −894 | −1115 | −701 | −1378 | * | * | | | | | | | | | | | | |
| 232(Q) | 954 | −1983 | −100 | 971 | −2337 | 177 | −267 | −2067 | 81 | −2060 | −1189 | −125 | −1637 | 2600 | −418 | −514 | −597 | −1649 | −2268 | −1597 | 238 |
| — | −149 | −500 | 233 | 43 | −381 | 399 | 106 | −626 | 210 | −466 | −720 | 275 | 394 | 45 | 96 | 359 | 117 | −369 | −294 | −249 | |
| — | −16 | −7108 | −8150 | −894 | −1115 | −701 | −1378 | * | * | | | | | | | | | | | | |
| 233(E) | −2641 | −3308 | −896 | 3732 | −3966 | −2458 | −2043 | −4105 | −2128 | −4016 | −3555 | −1531 | −2959 | −1842 | −2560 | −2479 | −2750 | −3722 | −3563 | −3385 | 239 |
| — | −149 | −500 | 233 | 43 | −381 | 399 | 106 | −626 | 210 | −466 | −720 | 275 | 394 | 45 | 96 | 359 | 117 | −369 | −294 | −249 | |
| — | −16 | −7108 | −8150 | −894 | −1115 | −701 | −1378 | * | * | | | | | | | | | | | | |
| 234(K) | −2620 | −2961 | −2461 | −2046 | −3743 | −2791 | −1570 | −3603 | 3784 | −3387 | −2839 | −2048 | −3039 | −1260 | −465 | −2604 | −2536 | −3331 | −3001 | −2988 | 240 |
| — | −149 | −500 | 233 | 43 | −381 | 399 | 106 | −626 | 210 | −466 | −720 | 275 | 394 | 45 | 96 | 359 | 117 | −369 | −294 | −249 | |
| — | −16 | −7108 | −8150 | −894 | −1115 | −701 | −1378 | * | * | | | | | | | | | | | | |
| 235(R) | 377 | −1802 | −415 | 988 | −2095 | −1474 | −95 | −1786 | 1452 | −1785 | −911 | −135 | −1560 | 343 | 1555 | −409 | −431 | 376 | −1986 | −1375 | 241 |
| — | −149 | −500 | 233 | 43 | −381 | 399 | 106 | −626 | 210 | −466 | −720 | 275 | 394 | 45 | 96 | 359 | 117 | −369 | −294 | −249 | |
| — | −16 | −7108 | −8150 | −894 | −1115 | −701 | −1378 | * | * | | | | | | | | | | | | |
| 236(D) | 1083 | −1565 | 2662 | −244 | −1941 | −1573 | −679 | 612 | −527 | −1651 | −980 | −490 | −1869 | −358 | −1003 | −771 | −766 | −903 | −2208 | −1633 | 242 |
| — | −149 | −500 | 233 | 43 | −381 | 399 | 106 | −626 | 210 | −466 | −720 | 275 | 394 | 45 | 96 | 359 | 117 | −369 | −294 | −249 | |
| — | −16 | −7108 | −8150 | −894 | −1115 | −701 | −1378 | * | * | | | | | | | | | | | | |
| 237(E) | −1225 | −2868 | 1894 | 1948 | −3149 | −1532 | −671 | −2975 | −630 | −2902 | −2101 | −150 | −1935 | −293 | −1299 | 1884 | −1241 | −2496 | −3093 | −2248 | 243 |
| — | −149 | −500 | 233 | 43 | −381 | 399 | 106 | −626 | 210 | −466 | −720 | 275 | 394 | 45 | 96 | 359 | 117 | −369 | −294 | −249 | |
| — | −16 | −7108 | −8150 | −894 | −1115 | −701 | −1378 | * | * | | | | | | | | | | | | |
| 238(C) | 1375 | 3262 | −2620 | −2108 | −827 | −1866 | −1267 | 1631 | −1811 | −599 | −10 | −1674 | −2137 | −1531 | −1786 | −1034 | 790 | 249 | −1361 | −1010 | 244 |
| — | −149 | −500 | 233 | 43 | −381 | 399 | 106 | −626 | 210 | −466 | −720 | 275 | 394 | 45 | 96 | 359 | 117 | −369 | −294 | −249 | |
| — | −16 | −7108 | −8150 | −894 | −1115 | −701 | −1378 | * | * | | | | | | | | | | | | |
| 239(E) | 635 | −1796 | 1055 | 1761 | −2018 | −1464 | −263 | 1191 | 28 | −1767 | −946 | −148 | −1637 | 135 | −481 | −520 | −553 | −1300 | −2077 | −1441 | 245 |
| — | −149 | −500 | 233 | 43 | −381 | 399 | 106 | −626 | 210 | −466 | −720 | 275 | 394 | 45 | 96 | 359 | 117 | −369 | −294 | −249 | |
| — | −16 | −7108 | −8150 | −894 | −1115 | −701 | −1378 | * | * | | | | | | | | | | | | |
| 240(E) | 593 | −2044 | −252 | 2548 | −2437 | −1542 | −329 | −2133 | 151 | −2120 | −1274 | −244 | −1738 | 89 | 946 | −646 | −717 | −1734 | −2305 | −1686 | 246 |
| — | −149 | −500 | 233 | 43 | −381 | 399 | 106 | −626 | 210 | −466 | −720 | 275 | 394 | 45 | 96 | 359 | 117 | −369 | −294 | −249 | |
| — | −16 | −7108 | −8150 | −894 | −1115 | −701 | −1378 | * | * | | | | | | | | | | | | |
| 241(S) | 1884 | −835 | −1962 | −1576 | −1634 | −1436 | −1320 | 1041 | −1409 | −1453 | −781 | −1293 | −1922 | −1241 | −1606 | 1973 | −597 | −669 | −2036 | −1656 | 247 |
| — | −149 | −500 | 233 | 43 | −381 | 399 | 106 | −626 | 210 | −466 | −720 | 275 | 394 | 45 | 96 | 359 | 117 | −369 | −294 | −249 | |
| — | −16 | −7108 | −8150 | −894 | −1115 | −701 | −1378 | * | * | | | | | | | | | | | | |
| 242(G) | 2267 | −1043 | −2388 | −2526 | −3253 | 2642 | −2373 | −2975 | −2639 | −3260 | −2410 | −1722 | −2033 | −2311 | −2648 | −663 | −860 | −2005 | −3436 | −3250 | 248 |
| — | −149 | −500 | 233 | 43 | −381 | 399 | 106 | −626 | 210 | −466 | −720 | 275 | 394 | 45 | 96 | 359 | 117 | −369 | −294 | −249 | |
| — | −16 | −7108 | −8150 | −894 | −1115 | −701 | −1378 | * | * | | | | | | | | | | | | |
| 243(R) | −876 | −2087 | −829 | 1490 | −2474 | −1766 | −229 | −2106 | 1269 | −44 | −1198 | −424 | −1829 | 205 | 2225 | −775 | −768 | −1753 | −2143 | −1647 | 249 |
| — | −149 | −500 | 233 | 43 | −381 | 399 | 106 | −626 | 210 | −466 | −720 | 275 | 394 | 45 | 96 | 359 | 117 | −369 | −294 | −249 | |
| — | −16 | −7108 | −8150 | −894 | −1115 | −701 | −1378 | * | * | | | | | | | | | | | | |
| 244(V) | 2339 | −967 | −2970 | −2766 | −1878 | −1847 | −2252 | 32 | −2541 | −1299 | −918 | −2087 | −2399 | −2316 | −2545 | −1157 | −971 | 2345 | −2605 | −2251 | 250 |
| — | −149 | −500 | 233 | 43 | −381 | 399 | 106 | −626 | 210 | −466 | −720 | 275 | 394 | 45 | 96 | 359 | 117 | −369 | −294 | −249 | |
| — | −16 | −7108 | −8150 | −894 | −1115 | −701 | −1378 | * | * | | | | | | | | | | | | |
| 245(I) | −1827 | −1398 | −4307 | −3831 | −1099 | −3939 | −3142 | 2286 | −3619 | 1835 | 69 | −3579 | −3671 | −3177 | −3511 | −3178 | −1781 | 1918 | −2524 | −2310 | 251 |
| — | −149 | −500 | 233 | 43 | −381 | 399 | 106 | −626 | 210 | −466 | −720 | 275 | 394 | 45 | 96 | 359 | 117 | −369 | −294 | −249 | |
| — | −16 | −7108 | −8150 | −894 | −1115 | −701 | −1378 | * | * | | | | | | | | | | | | |
| 246(V) | −1178 | −1448 | −1943 | −1452 | −1776 | −2261 | −1140 | −227 | 1866 | −1260 | −816 | −1444 | −2448 | −902 | −540 | −1496 | −1176 | 2697 | −2161 | −1764 | 252 |
| — | −149 | −500 | 233 | 43 | −381 | 399 | 106 | −626 | 210 | −466 | −720 | 275 | 394 | 45 | 96 | 359 | 117 | −369 | −294 | −249 | |
| — | −16 | −7108 | −8150 | −894 | −1115 | −701 | −1378 | * | * | | | | | | | | | | | | |
| 247(E) | −508 | −1976 | 840 | 1547 | −2280 | −1393 | −117 | −2029 | 1400 | −1984 | −1077 | 1158 | −1531 | 330 | −253 | −378 | −454 | 262 | −2163 | −1471 | 253 |
| — | −149 | −500 | 233 | 43 | −381 | 399 | 106 | −626 | 210 | −466 | −720 | 275 | 394 | 45 | 96 | 359 | 117 | −369 | −294 | −249 | |
| — | −16 | −7108 | −8150 | −894 | −1115 | −701 | −1378 | * | * | | | | | | | | | | | | |
| 248(M) | 1703 | −991 | −2901 | −2342 | −528 | −2567 | −1550 | 166 | −2031 | 1544 | 2668 | −2104 | −2591 | −1715 | −2010 | −1685 | −1052 | −12 | −1442 | −1177 | 254 |
| — | −149 | −500 | 233 | 43 | −381 | 399 | 106 | −626 | 210 | −466 | −720 | 275 | 394 | 45 | 96 | 359 | 117 | −369 | −294 | −249 | |
| — | −16 | −7108 | −8150 | −894 | −1115 | −701 | −1378 | * | * | | | | | | | | | | | | |
| 249(I) | −1947 | −1516 | −4385 | −3885 | −916 | −4013 | −3118 | 2193 | −3656 | 2186 | 257 | −3656 | −3687 | −3109 | −3494 | −3250 | −1889 | 1383 | −2397 | −2258 | 255 |
| — | −149 | −500 | 233 | 43 | −381 | 399 | 106 | −626 | 210 | −466 | −720 | 275 | 394 | 45 | 96 | 359 | 117 | −369 | −294 | −249 | |
| — | −16 | −7108 | −8150 | −894 | −1115 | −701 | −1378 | * | * | | | | | | | | | | | | |
| 250(E) | −1322 | −2647 | −272 | 2491 | −3071 | −1811 | −576 | −2759 | 2306 | −2633 | −1854 | −464 | −2066 | −175 | −177 | −1144 | −1256 | −2368 | −2692 | −2140 | 256 |
| — | −149 | −500 | 233 | 43 | −381 | 399 | 106 | −626 | 210 | −466 | −720 | 275 | 394 | 45 | 96 | 359 | 117 | −369 | −294 | −249 | |
| — | −16 | −7108 | −8150 | −894 | −1115 | −701 | −1378 | * | * | | | | | | | | | | | | |
| 251(K) | −1395 | −2059 | −1711 | −1014 | −2215 | −2218 | −641 | −1709 | 3021 | −1652 | 2578 | −1075 | −2303 | −282 | 287 | −1423 | −1283 | −1603 | −2159 | −1803 | 257 |
| — | −149 | −500 | 233 | 43 | −381 | 399 | 106 | −626 | 210 | −466 | −720 | 275 | 394 | 45 | 96 | 359 | 117 | −369 | −294 | −249 | |
| — | −16 | −7108 | −8150 | −894 | −1115 | −701 | −1378 | * | * | | | | | | | | | | | | |
| 252(D) | −1285 | −2888 | 2677 | 176 | −3210 | 1189 | −737 | −3047 | −715 | −2977 | −2195 | −190 | −1979 | 2106 | −1379 | −1050 | −1315 | −2564 | −3161 | −2320 | 258 |
| — | −149 | −500 | 233 | 43 | −381 | 399 | 106 | −626 | 210 | −466 | −720 | 275 | 394 | 45 | 96 | 359 | 117 | −369 | −294 | −249 | |
| — | −16 | −7108 | −8150 | −894 | −1115 | −701 | −1378 | * | * | | | | | | | | | | | | |
| 253(I) | −2073 | −1632 | −4434 | −3975 | −911 | −4130 | −3238 | 3164 | −3706 | 1451 | 244 | −3779 | −3785 | −3187 | −3557 | −3413 | −2021 | 546 | −2449 | −2273 | 259 |
| — | −149 | −500 | 233 | 43 | −381 | 399 | 106 | −626 | 210 | −466 | −720 | 275 | 394 | 45 | 96 | 359 | 117 | −369 | −294 | −249 | |
| — | −16 | −7108 | −8150 | −894 | −1115 | −701 | −1378 | * | * | | | | | | | | | | | | |
| 254(K) | −1570 | −2144 | −1887 | −1191 | −2098 | −2363 | −750 | −1603 | 3034 | 938 | −1112 | −1231 | −2436 | −408 | 215 | −1616 | −1443 | −1580 | −2166 | −1804 | 260 |
| — | −149 | −500 | 233 | 43 | −381 | 399 | 106 | −626 | 210 | −466 | −720 | 275 | 394 | 45 | 96 | 359 | 117 | −369 | −294 | −249 | |
| — | −16 | −7108 | −8150 | −894 | −1115 | −701 | −1378 | * | * | | | | | | | | | | | | |
| 255(P) | −2931 | −2878 | −3420 | −3706 | −4181 | −2925 | −3468 | −4621 | −3859 | −4490 | −4165 | −3491 | 4225 | −3781 | −3695 | −3182 | −3279 | −4087 | −3594 | −4064 | 261 |
| — | −149 | −500 | 233 | 43 | −381 | 399 | 106 | −626 | 210 | −466 | −720 | 275 | 394 | 45 | 96 | 359 | 117 | −369 | −294 | −249 | |
| — | −16 | −7108 | −8150 | −894 | −1115 | −701 | −1378 | * | * | | | | | | | | | | | | |
| 256(R) | −928 | −1705 | −1507 | −1055 | −2761 | −1730 | −896 | −2490 | −44 | −2489 | −1723 | −1042 | −2102 | −543 | 2614 | 2258 | −1053 | −1998 | −2546 | −2158 | 262 |
| — | −149 | −500 | 233 | 43 | −381 | 399 | 106 | −626 | 210 | −466 | −720 | 275 | 394 | 45 | 96 | 359 | 117 | −369 | −294 | −249 | |
| — | −16 | −7108 | −8150 | −894 | −1115 | −701 | −1378 | * | * | | | | | | | | | | | | |
| 257(D) | −1280 | −2865 | 3154 | 175 | −3194 | −1547 | −743 | −3034 | −728 | −2971 | −2194 | −190 | −1979 | 1342 | −1391 | 553 | −1316 | −2552 | −3161 | −2317 | 263 |
| — | −149 | −500 | 233 | 43 | −381 | 399 | 106 | −626 | 210 | −466 | −720 | 275 | 394 | 45 | 96 | 359 | 117 | −369 | −294 | −249 | |
| — | −16 | −7108 | −8150 | −894 | −1115 | −701 | −1378 | * | * | | | | | | | | | | | | |
| 258(I) | −1997 | −1562 | −4355 | −3927 | −1042 | −4066 | −3261 | 3343 | −3654 | 937 | 97 | −3718 | −3783 | −3239 | −3555 | −3364 | −1959 | 702 | −2549 | −2295 | 264 |
| — | −149 | −500 | 233 | 43 | −381 | 399 | 106 | −626 | 210 | −466 | −720 | 275 | 394 | 45 | 96 | 359 | 117 | −369 | −294 | −249 | |
| — | −16 | −7108 | −8150 | −894 | −1115 | −701 | −1378 | * | * | | | | | | | | | | | | |
| 259(M) | −2252 | −1821 | −4572 | −3991 | −530 | −4164 | −2990 | 2068 | −3709 | 1993 | 3197 | −3808 | −3685 | −2916 | −3406 | −3378 | −2149 | −172 | −2084 | −2091 | 265 |
| — | −149 | −500 | 233 | 43 | −381 | 399 | 106 | −626 | 210 | −466 | −720 | 275 | 394 | 45 | 96 | 359 | 117 | −369 | −294 | −249 | |
| — | −16 | −7108 | −8150 | −894 | −1115 | −701 | −1378 | * | * | | | | | | | | | | | | |
| 260(T) | −1213 | −1674 | −2755 | −2906 | −3163 | −1922 | −2659 | −2698 | −2788 | −3105 | −2612 | −2311 | −2600 | −2708 | −2753 | −1463 | 3819 | −2197 | −3286 | −3156 | 266 |
| — | −149 | −500 | 233 | 43 | −381 | 399 | 106 | −626 | 210 | −466 | −720 | 275 | 394 | 45 | 96 | 359 | 117 | −369 | −294 | −249 | |
| — | −16 | −7108 | −8150 | −894 | −1115 | −701 | −1378 | * | * | | | | | | | | | | | | |
| 261(R) | −2131 | −2786 | −2704 | −1460 | −3618 | −2638 | −587 | −2976 | 1735 | −2645 | −1985 | −1353 | −2603 | −173 | 3492 | −2020 | −1828 | −2748 | −2484 | −2384 | 267 |
| — | −149 | −500 | 233 | 43 | −381 | 399 | 106 | −626 | 210 | −466 | −720 | 275 | 394 | 45 | 96 | 359 | 117 | −369 | −294 | −249 | |
| — | −16 | −7108 | −8150 | −894 | −1115 | −701 | −1378 | * | * | | | | | | | | | | | | |
| 262(K) | −1349 | −2635 | −381 | 2083 | −3083 | −1857 | −565 | −2750 | 2690 | −2612 | −1837 | −514 | −2090 | −161 | −61 | −1178 | −1271 | −2369 | −2655 | −2138 | 268 |
| — | −149 | −500 | 233 | 43 | −381 | 399 | 106 | −626 | 210 | −466 | −720 | 275 | 394 | 45 | 96 | 359 | 117 | −369 | −294 | −249 | |
| — | −16 | −7108 | −8150 | −894 | −1115 | −701 | −1378 | * | * | | | | | | | | | | | | |
| 263(A) | 2821 | −932 | −2451 | −2472 | −3065 | −1198 | −2233 | −2763 | −2434 | −3056 | −2201 | −1633 | −1940 | −2147 | −2468 | 1831 | −730 | −1840 | −3305 | −3055 | 269 |
| — | −149 | −500 | 233 | 43 | −381 | 399 | 106 | −626 | 210 | −466 | −720 | 275 | 394 | 45 | 96 | 359 | 117 | −369 | −294 | −249 | |
| — | −16 | −7108 | −8150 | −894 | −1115 | −701 | −1378 | * | * | | | | | | | | | | | | |
| 264(F) | −2063 | −1686 | −4037 | −3677 | 3437 | −3644 | −1706 | 2063 | −3359 | 135 | 67 | −3095 | −3486 | −2739 | −3127 | −2876 | −2012 | −83 | −1038 | −158 | 270 |
| — | −149 | −500 | 233 | 43 | −381 | 399 | 106 | −626 | 210 | −466 | −720 | 275 | 394 | 45 | 96 | 359 | 117 | −369 | −294 | −249 | |
| — | −16 | −7108 | −8150 | −894 | −1115 | −701 | −1378 | * | * | | | | | | | | | | | | |
| 265(E) | −2641 | −3308 | −896 | 3732 | −3966 | −2458 | −2043 | −4105 | −2128 | −4016 | −3555 | −1531 | −2959 | −1842 | −2560 | −2479 | −2750 | −3722 | −3563 | −3385 | 271 |
| — | −149 | −500 | 233 | 43 | −381 | 399 | 106 | −626 | 210 | −466 | −720 | 275 | 394 | 45 | 96 | 359 | 117 | −369 | −294 | −249 | |
| — | −16 | −7108 | −8150 | −894 | −1115 | −701 | −1378 | * | * | | | | | | | | | | | | |
| 266(N) | −1662 | −3306 | 2055 | 78 | −3621 | −1643 | −1040 | −3622 | −1272 | −3531 | −2870 | 3477 | −2182 | −724 | −2071 | −1371 | −1757 | −3092 | −3633 | −2700 | 272 |
| — | −149 | −500 | 233 | 43 | −381 | 399 | 106 | −626 | 210 | −466 | −720 | 275 | 394 | 45 | 96 | 359 | 117 | −369 | −294 | −249 | |
| — | −16 | −7108 | −8150 | −894 | −1115 | −701 | −1378 | * | * | | | | | | | | | | | | |
| 267(A) | 3438 | −1472 | −2846 | −3040 | −3287 | −1726 | −2735 | −2840 | −3028 | −3257 | −2662 | −2236 | −2447 | −2798 | −2944 | −1216 | −1387 | −2183 | −3405 | −3320 | 273 |
| — | −149 | −500 | 233 | 43 | −381 | 399 | 106 | −626 | 210 | −466 | −720 | 275 | 394 | 45 | 96 | 359 | 117 | −369 | −294 | −249 | |
| — | −16 | −7108 | −8150 | −894 | −1115 | −701 | −1378 | * | * | | | | | | | | | | | | |
| 268(I) | −1760 | −1307 | −4325 | −3962 | −1735 | −4042 | −3726 | 3135 | −3828 | −579 | −515 | −3722 | −3869 | −3673 | −3896 | −3359 | −1752 | 2276 | −3240 | −2806 | 274 |
| — | −149 | −500 | 233 | 43 | −381 | 399 | 106 | −626 | 210 | −466 | −720 | 275 | 394 | 45 | 96 | 359 | 117 | −369 | −294 | −249 | |
| — | −16 | −7108 | −8150 | −894 | −1115 | −701 | −1378 | * | * | | | | | | | | | | | | |
| 269(T) | 1428 | −904 | −2334 | −2158 | −2747 | −1206 | −1940 | −2392 | −2037 | −2678 | −1846 | −1504 | −1896 | −1809 | −2163 | 902 | 3001 | −1635 | −2999 | −2705 | 275 |
| — | −149 | −500 | 233 | 43 | −381 | 399 | 106 | −626 | 210 | −466 | −720 | 275 | 394 | 45 | 96 | 359 | 117 | −369 | −294 | −249 | |
| — | −16 | −7108 | −8150 | −894 | −1115 | −701 | −1378 | * | * | | | | | | | | | | | | |
| 270(V) | −1745 | −1300 | −4286 | −3858 | −1446 | −3967 | −3370 | 2358 | −3688 | 852 | −261 | −3606 | −3749 | −3403 | −3673 | −3232 | −1717 | 2643 | −2856 | −2524 | 276 |
| — | −149 | −500 | 233 | 43 | −381 | 399 | 106 | −626 | 210 | −466 | −720 | 275 | 394 | 45 | 96 | 359 | 117 | −369 | −294 | −249 | |
| — | −16 | −7108 | −8150 | −894 | −1115 | −701 | −1378 | * | * | | | | | | | | | | | | |
| 271(V) | −1404 | −1072 | −3766 | −3305 | −1464 | −3356 | −2696 | 2276 | −3080 | −616 | −379 | −3001 | −3325 | −2870 | −3091 | −2563 | 1344 | 2521 | −2516 | −2113 | 277 |
| — | −149 | −500 | 233 | 43 | −381 | 399 | 106 | −626 | 210 | −466 | −720 | 275 | 394 | 45 | 96 | 359 | 117 | −369 | −294 | −249 | |
| — | −16 | −7108 | −8150 | −894 | −1115 | −701 | −1378 | * | * | | | | | | | | | | | | |
| 272(M) | 866 | −1113 | −2656 | −2412 | −1322 | −1920 | −1883 | −487 | −2061 | −587 | 4451 | −1950 | −2387 | −1928 | −2078 | −1220 | −1053 | −498 | −2134 | −1803 | 278 |
| — | −149 | −500 | 233 | 43 | −381 | 399 | 106 | −626 | 210 | −466 | −720 | 275 | 394 | 45 | 96 | 359 | 117 | −369 | −294 | −249 | |
| — | −16 | −7108 | −8150 | −894 | −1115 | −701 | −1378 | * | * | | | | | | | | | | | | |
| 273(A) | 2601 | −957 | −2898 | −2711 | −1943 | −1740 | −2211 | −165 | −2487 | −1406 | −1001 | −2008 | −2320 | −2260 | −2494 | −1053 | −929 | 1990 | −2626 | −2279 | 279 |
| — | −149 | −500 | 233 | 43 | −381 | 399 | 106 | −626 | 210 | −466 | −720 | 275 | 394 | 45 | 96 | 359 | 117 | −369 | −294 | −249 | |
| — | −16 | −7108 | −8150 | −894 | −1115 | −701 | −1378 | * | * | | | | | | | | | | | | |
| 274(L) | −1171 | −983 | −3266 | −2733 | −796 | −2795 | −1888 | 590 | −2418 | 2001 | 198 | −2418 | −2816 | −2106 | −2362 | −1944 | 965 | 1777 | −1724 | −1426 | 280 |
| — | −149 | −500 | 233 | 43 | −381 | 399 | 106 | −626 | 210 | −466 | −720 | 275 | 394 | 45 | 96 | 359 | 117 | −369 | −294 | −249 | |
| — | −16 | −7108 | −8150 | −894 | −1115 | −701 | −1378 | * | * | | | | | | | | | | | | |
| 275(G) | −2594 | −2690 | −3304 | −3623 | −4328 | 3747 | −3462 | −4761 | −3953 | −4671 | −4212 | −3320 | −3352 | −3748 | −3779 | −2839 | −2981 | −4004 | −3668 | −4222 | 281 |
| — | −149 | −500 | 233 | 43 | −381 | 399 | 106 | −626 | 210 | −466 | −720 | 275 | 394 | 45 | 96 | 359 | 117 | −369 | −294 | −249 | |
| — | −16 | −7108 | −8150 | −894 | −1115 | −701 | −1378 | * | * | | | | | | | | | | | | |
| 276(G) | −2594 | −2690 | −3304 | −3623 | −4328 | 3747 | −3462 | −4761 | −3953 | −4671 | −4212 | −3320 | −3352 | −3748 | −3779 | −2839 | −2981 | −4004 | −3668 | −4222 | 282 |
| — | −149 | −500 | 233 | 43 | −381 | 399 | 106 | −626 | 210 | −466 | −720 | 275 | 394 | 45 | 96 | 359 | 117 | −369 | −294 | −249 | |
| — | −16 | −7108 | −8150 | −894 | −1115 | −701 | −1378 | * | * | | | | | | | | | | | | |
| 277(S) | −897 | −1462 | −2333 | −2543 | −3185 | −1640 | −2474 | −3294 | −2686 | −3497 | −2780 | −1973 | −2360 | −2483 | −2703 | 3465 | −1316 | −2413 | −3310 | −3025 | 283 |
| — | −149 | −500 | 233 | 43 | −381 | 399 | 106 | −626 | 210 | −466 | −720 | 275 | 394 | 45 | 96 | 359 | 117 | −369 | −294 | −249 | |
| — | −16 | −7108 | −8150 | −894 | −1115 | −701 | −1378 | * | * | | | | | | | | | | | | |
| 278(T) | −1213 | −1674 | −2755 | −2906 | −3163 | −1922 | −2659 | −2698 | −2788 | −3105 | −2612 | −2311 | −2600 | −2708 | −2753 | −1463 | 3819 | −2197 | −3286 | −3156 | 284 |
| — | −149 | −500 | 233 | 43 | −381 | 399 | 106 | −626 | 210 | −466 | −720 | 275 | 394 | 45 | 96 | 359 | 117 | −369 | −294 | −249 | |
| — | −16 | −7108 | −8150 | −894 | −1115 | −701 | −1378 | * | * | | | | | | | | | | | | |
| 279(N) | −2171 | −2655 | −1458 | −1748 | −3334 | −2364 | −2267 | −3943 | −2365 | −3936 | −3437 | 4205 | −2932 | −2205 | −2608 | −2224 | −2439 | −3392 | −3253 | −2909 | 285 |
| — | −149 | −500 | 233 | 43 | −381 | 399 | 106 | −626 | 210 | −466 | −720 | 275 | 394 | 45 | 96 | 359 | 117 | −369 | −294 | −249 | |
| — | −16 | −7108 | −8150 | −894 | −1115 | −701 | −1378 | * | * | | | | | | | | | | | | |
| 280(A) | 3134 | −934 | −2491 | −2567 | −3083 | −1203 | −2300 | −2766 | −2540 | −3082 | −2237 | −1672 | −1954 | −2240 | −2537 | 874 | −747 | −1844 | −3333 | −3093 | 286 |
| — | −149 | −500 | 233 | 43 | −381 | 399 | 106 | −626 | 210 | −466 | −720 | 275 | 394 | 45 | 96 | 359 | 117 | −369 | −294 | −249 | |
| — | −16 | −7108 | −8150 | −894 | −1115 | −701 | −1378 | * | * | | | | | | | | | | | | |
| 281(V) | −984 | −1045 | −3169 | −2909 | −1709 | −2304 | −2404 | 531 | −2643 | −988 | −697 | −2378 | −2722 | −2480 | −2661 | −1601 | 1504 | 3014 | −2588 | −2201 | 287 |
| — | −149 | −500 | 233 | 43 | −381 | 399 | 106 | −626 | 210 | −466 | −720 | 275 | 394 | 45 | 96 | 359 | 117 | −369 | −294 | −249 | |
| — | −16 | −7108 | −8150 | −894 | −1115 | −701 | −1378 | * | * | | | | | | | | | | | | |
| 282(L) | −2631 | −2159 | −4786 | −4228 | −462 | −4506 | −3231 | 96 | −3878 | 2828 | 2482 | −4157 | −3880 | −3016 | −3541 | −3793 | −2509 | −608 | −2134 | −2182 | 288 |
| — | −149 | −500 | 233 | 43 | −381 | 399 | 106 | −626 | 210 | −466 | −720 | 275 | 394 | 45 | 96 | 359 | 117 | −369 | −294 | −249 | |
| — | −16 | −7108 | −8150 | −894 | −1115 | −701 | −1378 | * | * | | | | | | | | | | | | |
| 283(H) | −3205 | −3079 | −2723 | −2890 | −2110 | −3046 | 5295 | −4135 | −2617 | −3813 | −3561 | −2886 | −3482 | −2833 | −2620 | −3291 | −3356 | −3895 | −2397 | −1681 | 289 |
| — | −149 | −500 | 233 | 43 | −381 | 399 | 106 | −626 | 210 | −466 | −720 | 275 | 394 | 45 | 96 | 359 | 117 | −369 | −294 | −249 | |
| — | −16 | −7108 | −8150 | −894 | −1115 | −701 | −1378 | * | * | | | | | | | | | | | | |
| 284(L) | −1623 | −1338 | −3726 | −3164 | −251 | −3255 | −1820 | 1373 | −2808 | 2371 | 514 | −2785 | −3086 | −2281 | −2613 | −2389 | −1543 | −161 | −1311 | 1782 | 290 |
| — | −149 | −500 | 233 | 43 | −381 | 399 | 106 | −626 | 210 | −466 | −720 | 275 | 394 | 45 | 96 | 359 | 117 | −369 | −294 | −249 | |
| — | −16 | −7108 | −8150 | −894 | −1115 | −701 | −1378 | * | * | | | | | | | | | | | | |
| 285(L) | −2333 | −1873 | −4640 | −4127 | −650 | −4326 | −3241 | 2176 | −3843 | 2519 | 523 | −3982 | −3833 | −3105 | −3579 | −3604 | −2247 | 56 | −2268 | −2230 | 291 |
| — | −149 | −500 | 233 | 43 | −381 | 399 | 106 | −626 | 210 | −466 | −720 | 275 | 394 | 45 | 96 | 359 | 117 | −369 | −294 | −249 | |
| — | −16 | −7108 | −8150 | −894 | −1115 | −701 | −1378 | * | * | | | | | | | | | | | | |
| 286(A) | 3438 | −1472 | −2846 | −3040 | −3287 | −1726 | −2735 | −2840 | −3028 | −3257 | −2662 | −2236 | −2447 | −2798 | −2944 | −1216 | −1387 | −2183 | −3405 | −3320 | 292 |
| — | −149 | −500 | 233 | 43 | −381 | 399 | 106 | −626 | 210 | −466 | −720 | 275 | 394 | 45 | 96 | 359 | 117 | −369 | −294 | −249 | |
| — | −16 | −7108 | −8150 | −894 | −1115 | −701 | −1378 | * | * | | | | | | | | | | | | |
| 287(M) | −1886 | −1507 | −4178 | −3693 | −877 | −3806 | −2901 | 3008 | −3380 | 335 | 3109 | −3451 | −3570 | −2934 | −3251 | −3044 | −1840 | 524 | −2288 | −2089 | 293 |
| — | −149 | −500 | 233 | 43 | −381 | 399 | 106 | −626 | 210 | −466 | −720 | 275 | 394 | 45 | 96 | 359 | 117 | −369 | −294 | −249 | |
| — | −16 | −7108 | −8150 | −894 | −1115 | −701 | −1378 | * | * | | | | | | | | | | | | |
| 288(A) | 3438 | −1472 | −2846 | −3040 | −3287 | −1726 | −2735 | −2840 | −3028 | −3257 | −2662 | −2236 | −2447 | −2798 | −2944 | −1216 | −1387 | −2183 | −3405 | −3320 | 294 |
| — | −149 | −500 | 233 | 43 | −381 | 399 | 106 | −626 | 210 | −466 | −720 | 275 | 394 | 45 | 96 | 359 | 117 | −369 | −294 | −249 | |
| — | −16 | −7108 | −8150 | −894 | −1115 | −701 | −1378 | * | * | | | | | | | | | | | | |
| 289(H) | −1490 | −2484 | −362 | −476 | −1816 | −1880 | 4320 | −2854 | −684 | −2770 | −2133 | 2185 | −2285 | −728 | −1000 | −1377 | −1550 | −2475 | −2146 | −1255 | 295 |
| — | −149 | −500 | 233 | 43 | −381 | 399 | 106 | −626 | 210 | −466 | −720 | 275 | 394 | 45 | 96 | 359 | 117 | −369 | −294 | −249 | |
| — | −16 | −7108 | −8150 | −894 | −1115 | −701 | −1378 | * | * | | | | | | | | | | | | |
| 290(A) | 2439 | −911 | −2326 | −2131 | −2811 | −1197 | −1934 | −2480 | −2011 | −2745 | −1898 | −1490 | −1888 | −1785 | −2153 | 1898 | 1073 | −1682 | −3044 | −2749 | 296 |
| — | −149 | −500 | 233 | 43 | −381 | 399 | 106 | −626 | 210 | −466 | −720 | 275 | 394 | 45 | 96 | 359 | 117 | −369 | −294 | −249 | |
| — | −16 | −7108 | −8150 | −894 | −1115 | −701 | −1378 | * | * | | | | | | | | | | | | |
| 291(I) | 2038 | −985 | −3388 | −2919 | −1320 | −2893 | −2277 | 2155 | −2677 | −587 | −297 | −2593 | −2992 | −2450 | −2697 | −2087 | −1208 | 1681 | −2229 | −1846 | 297 |
| — | −149 | −500 | 233 | 43 | −381 | 399 | 106 | −626 | 210 | −466 | −720 | 275 | 394 | 45 | 96 | 359 | 117 | −369 | −294 | −249 | |
| — | −16 | −7108 | −8150 | −894 | −1115 | −701 | −1378 | * | * | | | | | | | | | | | | |
| 292(G) | −1243 | −2769 | 311 | 1902 | −3172 | 1980 | −744 | −2992 | −697 | −2936 | −2152 | 1923 | −1974 | −377 | −1331 | −1030 | −1284 | 2506 | −3125 | −2308 | 298 |
| — | −149 | −500 | 233 | 43 | −381 | 399 | 106 | −626 | 210 | −466 | −720 | 275 | 394 | 45 | 96 | 359 | 117 | −369 | −294 | −249 | |
| — | −16 | −7108 | −8150 | −894 | −1115 | −701 | −1378 | * | * | | | | | | | | | | | | |
| 293(V) | −1738 | −1298 | −4281 | −3921 | −1737 | −3979 | −3665 | 1917 | −3774 | −601 | −528 | −3671 | −3834 | −3628 | −3843 | −3293 | −1735 | 3205 | −3215 | −2770 | 299 |
| — | −149 | −500 | 233 | 43 | −381 | 399 | 106 | −626 | 210 | −466 | −720 | 275 | 394 | 45 | 96 | 359 | 117 | −369 | −294 | −249 | |
| — | −16 | −7108 | −8150 | −894 | −1115 | −701 | −1378 | * | * | | | | | | | | | | | | |
| 294(E) | −833 | −2344 | 1092 | 2412 | −2643 | −1464 | −386 | −2413 | −146 | −2369 | −1505 | −96 | 562 | 29 | −717 | −666 | 862 | −1966 | −2562 | −1818 | 300 |
| — | −149 | −500 | 233 | 43 | −381 | 399 | 106 | −626 | 210 | −466 | −720 | 275 | 394 | 45 | 96 | 359 | 117 | −369 | −294 | −249 | |
| — | −16 | −7108 | −8150 | −894 | −1115 | −701 | −1378 | * | * | | | | | | | | | | | | |
| 295(W) | −1380 | −1116 | −3614 | −3026 | 1322 | −2981 | −1582 | 1966 | −2661 | 1775 | 556 | −2562 | −2865 | −2117 | −2424 | −2098 | −1302 | −187 | 2908 | −629 | 301 |
| — | −149 | −500 | 233 | 43 | −381 | 399 | 106 | −626 | 210 | −466 | −720 | 275 | 394 | 45 | 96 | 359 | 117 | −369 | −294 | −249 | |
| — | −16 | −7108 | −8150 | −894 | −1115 | −701 | −1378 | * | * | | | | | | | | | | | | |
| 296(T) | −350 | −973 | −2204 | −2178 | −2893 | −1236 | −2035 | −2561 | −2117 | −2862 | −2043 | −1536 | −1946 | −1916 | −2214 | 1618 | 3198 | −1758 | −3137 | −2831 | 302 |
| — | −149 | −500 | 233 | 43 | −381 | 399 | 106 | −626 | 210 | −466 | −720 | 275 | 394 | 45 | 96 | 359 | 117 | −369 | −294 | −249 | |
| — | −16 | −7108 | −8150 | −894 | −1115 | −701 | −1378 | * | * | | | | | | | | | | | | |
| 297(L) | −1443 | −1269 | −3144 | −2576 | −528 | −3014 | −1816 | 1945 | −2155 | 2102 | 508 | −2422 | −2899 | 1193 | −2133 | −2129 | −1369 | −50 | −1616 | −1384 | 303 |
| — | −149 | −500 | 233 | 43 | −381 | 399 | 106 | −626 | 210 | −466 | −720 | 275 | 394 | 45 | 96 | 359 | 117 | −369 | −294 | −249 | |
| — | −16 | −7108 | −8150 | −894 | −1115 | −701 | −1378 | * | * | | | | | | | | | | | | |
| 298(D) | −1826 | −3682 | 3559 | 1199 | −3883 | 1662 | −1073 | −3846 | −1391 | −3720 | −3110 | −272 | −2222 | −760 | −2283 | −1471 | −1913 | −3321 | −3864 | −2864 | 304 |
| — | −149 | −500 | 233 | 43 | −381 | 399 | 106 | −626 | 210 | −466 | −720 | 275 | 394 | 45 | 96 | 359 | 117 | −369 | −294 | −249 | |
| — | −16 | −7108 | −8150 | −894 | −1115 | −701 | −1378 | * | * | | | | | | | | | | | | |
| 299(D) | −2784 | −3432 | 4016 | −1200 | 4140 | −2466 | −2197 | −4505 | −2621 | −4365 | −3956 | −1551 | −3014 | −2039 | −3232 | −2593 | −2938 | −4046 | −3710 | −3552 | 305 |
| — | −149 | −500 | 233 | 43 | −381 | 399 | 106 | −626 | 210 | −466 | −720 | 275 | 394 | 45 | 96 | 359 | 117 | −369 | −294 | −249 | |
| — | −16 | −7108 | −8150 | −894 | −1115 | −701 | −1378 | * | * | | | | | | | | | | | | |
| 300(F) | −3342 | −2776 | −4026 | −4232 | 4354 | −3545 | −1431 | −2315 | −4038 | −1801 | −1900 | −3299 | −3780 | −3350 | −3645 | −3490 | −3420 | −2566 | −739 | 349 | 306 |
| — | −149 | −500 | 233 | 43 | −381 | 399 | 106 | −626 | 210 | −466 | −720 | 275 | 394 | 45 | 96 | 359 | 117 | −369 | −294 | −249 | |
| — | −16 | −7108 | −8150 | −894 | −1115 | −701 | −1378 | * | * | | | | | | | | | | | | |
| 301(Q) | −1048 | −2608 | 205 | 2170 | −2893 | −1535 | −505 | −2680 | −255 | −2604 | −1769 | 1814 | −1849 | 2272 | −789 | −848 | −1028 | −2228 | −2770 | −2013 | 307 |
| — | −149 | −500 | 233 | 43 | −381 | 399 | 106 | −626 | 210 | −466 | −720 | 275 | 394 | 45 | 96 | 359 | 117 | −369 | −294 | −249 | |
| — | −16 | −7108 | −8150 | −894 | −1115 | −701 | −1378 | * | * | | | | | | | | | | | | |
| 302(R) | 1083 | −1687 | 691 | 135 | −2058 | −1406 | −178 | −1755 | 214 | −1793 | −924 | −145 | −1553 | 247 | 1670 | −383 | 1217 | −1367 | −2031 | −1404 | 308 |
| — | −149 | −500 | 233 | 43 | −381 | 399 | 106 | −626 | 210 | −466 | −720 | 275 | 394 | 45 | 96 | 359 | 117 | −369 | −294 | −249 | |
| — | −16 | −7108 | −8150 | −894 | −1115 | −701 | −1378 | * | * | | | | | | | | | | | | |
| 303(I) | −1915 | −1536 | −4077 | −3667 | 2027 | −3678 | −2155 | 3137 | −3381 | 144 | 94 | −3225 | −3506 | −2848 | −3202 | −2914 | −1871 | 345 | −1522 | −791 | 309 |
| — | −149 | −500 | 233 | 43 | −381 | 399 | 106 | −626 | 210 | −466 | −720 | 275 | 394 | 45 | 96 | 359 | 117 | −369 | −294 | −249 | |
| — | −16 | −7108 | −8150 | −894 | −1115 | −701 | −1378 | * | * | | | | | | | | | | | | |
| 304(R) | −689 | −2015 | −494 | 24 | −2395 | −1582 | −184 | −2087 | 444 | −2020 | −1151 | 1161 | −1687 | 1832 | 2131 | 626 | −614 | −1684 | −2156 | −1573 | 310 |
| — | −149 | −500 | 233 | 43 | −381 | 399 | 106 | −626 | 210 | −466 | −720 | 275 | 394 | 45 | 96 | 359 | 117 | −369 | −294 | −249 | |
| — | −16 | −7108 | −8150 | −894 | −1115 | −701 | −1378 | * | * | | | | | | | | | | | | |
| 305(D) | 387 | −1967 | 1600 | 1359 | −2275 | −1391 | 1561 | −2025 | 282 | −1976 | −1067 | −25 | −1525 | 342 | 1024 | −369 | −443 | −1584 | −2152 | −1462 | 311 |
| — | −149 | −500 | 233 | 43 | −381 | 399 | 106 | −626 | 210 | −466 | −720 | 275 | 394 | 45 | 96 | 359 | 117 | −369 | −294 | −249 | |
| — | −16 | −7108 | −8150 | −894 | −1115 | −701 | −1378 | * | * | | | | | | | | | | | | |
| 306(R) | −1460 | −2315 | −1793 | −887 | −2832 | −2237 | −431 | −2288 | 2193 | −2199 | −1473 | −946 | −2245 | −20 | 2706 | −1394 | −1275 | 591 | −2248 | −1961 | 312 |
| — | −149 | −500 | 233 | 43 | −381 | 399 | 106 | −626 | 210 | −466 | −720 | 275 | 394 | 45 | 96 | 359 | 117 | −369 | −294 | −249 | |
| — | −16 | −7108 | −8150 | −894 | −1115 | −701 | −1378 | * | * | | | | | | | | | | | | |
| 307(V) | −941 | −1027 | −3099 | −2832 | −1692 | −2234 | −2324 | 470 | −2565 | −1003 | −695 | −2305 | −2663 | −2399 | −2587 | −1527 | 1858 | 2876 | −2536 | −2152 | 313 |
| — | −149 | −500 | 233 | 43 | −381 | 399 | 106 | −626 | 210 | −466 | −720 | 275 | 394 | 45 | 96 | 359 | 117 | −369 | −294 | −249 | |
| — | −16 | −7108 | −8150 | −894 | −1115 | −701 | −1378 | * | * | | | | | | | | | | | | |
| 308(P) | −2931 | −2878 | −3420 | −3706 | −4181 | −2925 | −3468 | −4621 | −3859 | −4490 | −4165 | −3491 | 4225 | −3781 | −3695 | −3182 | −3279 | −4087 | −3594 | −4064 | 314 |
| — | −149 | −500 | 233 | 43 | −381 | 399 | 106 | −626 | 210 | −466 | −720 | 275 | 394 | 45 | 96 | 359 | 117 | −369 | −294 | −249 | |
| — | −16 | −7108 | −8150 | −894 | −1115 | −701 | −1378 | * | * | | | | | | | | | | | | |
| 309(V) | −1090 | −1215 | −2097 | −1824 | −819 | −2221 | 2699 | −287 | −1392 | −1027 | −591 | −1674 | −2482 | −1446 | −1482 | −1482 | −1143 | 2879 | −1420 | −707 | 315 |
| — | −149 | −500 | 233 | 43 | −381 | 399 | 106 | −626 | 210 | −466 | −720 | 275 | 394 | 45 | 96 | 359 | 117 | −369 | −294 | −249 | |
| — | −16 | −7108 | −8150 | −894 | −1115 | −701 | −1378 | * | * | | | | | | | | | | | | |
| 310(L) | −2439 | −1972 | −4702 | −4181 | −588 | −4401 | −3258 | 1582 | −3881 | 2757 | 587 | −4061 | −3862 | −3093 | −3590 | −3689 | −2344 | −130 | −2230 | −2217 | 316 |
| — | −149 | −500 | 233 | 43 | −381 | 399 | 106 | −626 | 210 | −466 | −720 | 275 | 394 | 45 | 96 | 359 | 117 | −369 | −294 | −249 | |
| — | −16 | −7108 | −8150 | −894 | −1115 | −701 | −1378 | * | * | | | | | | | | | | | | |
| 311(C) | 2157 | 4166 | −3012 | −2973 | −2780 | 1022 | −2337 | −2398 | −2724 | −2744 | −1930 | −1786 | −1943 | −2372 | −2623 | −540 | −692 | −1624 | −3091 | −2881 | 317 |
| — | −149 | −500 | 233 | 43 | −381 | 399 | 106 | −626 | 210 | −466 | −720 | 275 | 394 | 45 | 96 | 359 | 117 | −369 | −294 | −249 | |
| — | −16 | −7108 | −8150 | −894 | −1115 | −701 | −1378 | * | * | | | | | | | | | | | | |
| 312(D) | −1732 | −3453 | 3468 | 99 | −3733 | −1645 | −1066 | −3747 | −1356 | −3641 | −3008 | 1690 | −2201 | −755 | −2209 | −1416 | −1833 | −3208 | −3752 | −2776 | 318 |
| — | −149 | −500 | 233 | 43 | −381 | 399 | 106 | −626 | 210 | −466 | −720 | 275 | 394 | 45 | 96 | 359 | 117 | −369 | −294 | −249 | |
| — | −16 | −7108 | −8150 | −894 | −1115 | −701 | −1378 | * | * | | | | | | | | | | | | |
| 313(L) | −2477 | −2023 | −4713 | −4122 | 1592 | −4329 | −2920 | 72 | −3835 | 2593 | 2472 | −3948 | −3754 | −2914 | −3466 | −3550 | −2350 | −634 | −1927 | −1830 | 319 |
| — | −149 | −500 | 233 | 43 | −381 | 399 | 106 | −626 | 210 | −466 | −720 | 275 | 394 | 45 | 96 | 359 | 117 | −369 | −294 | −249 | |
| — | −16 | −7108 | −8150 | −894 | −1115 | −701 | −1378 | * | * | | | | | | | | | | | | |
| 314(K) | −2620 | −2961 | −2461 | −2046 | −3743 | −2791 | −1570 | −3603 | 3784 | −3387 | −2839 | −2048 | −3039 | −1260 | −465 | −2604 | −2536 | −3331 | −3001 | −2988 | 320 |
| — | −149 | −500 | 233 | 43 | −381 | 399 | 106 | −626 | 210 | −466 | −720 | 275 | 394 | 45 | 96 | 359 | 117 | −369 | −294 | −249 | |
| — | −16 | −7108 | −8150 | −894 | −1115 | −701 | −1378 | * | * | | | | | | | | | | | | |
| 315(P) | −2931 | −2878 | −3420 | −3706 | −4181 | −2925 | −3468 | −4621 | −3859 | −4490 | −4165 | −3491 | 4225 | −3781 | −3695 | −3182 | −3279 | −4087 | −3594 | −4064 | 321 |
| — | −149 | −500 | 233 | 43 | −381 | 399 | 106 | −626 | 210 | −466 | −720 | 275 | 394 | 45 | 96 | 359 | 117 | −369 | −294 | −249 | |
| — | −16 | −7108 | −8150 | −894 | −1115 | −701 | −1378 | * | * | | | | | | | | | | | | |
| 316(S) | −897 | −1462 | −2333 | −2543 | −3185 | −1640 | −2474 | −3294 | −2686 | −3497 | −2780 | −1973 | −2360 | −2483 | −2703 | 3465 | −1316 | −2413 | −3310 | −3025 | 322 |
| — | −149 | −500 | 233 | 43 | −381 | 399 | 106 | −626 | 210 | −466 | −720 | 275 | 394 | 45 | 96 | 359 | 117 | −369 | −294 | −249 | |
| — | −16 | −7108 | −8150 | −894 | −1115 | −701 | −1378 | * | * | | | | | | | | | | | | |
| 317(G) | −2594 | −2690 | −3304 | −3623 | −4328 | 3747 | −3462 | −4761 | −3953 | −4671 | −4212 | −3320 | −3352 | −3748 | −3779 | −2839 | −2981 | −4004 | −3668 | −4222 | 323 |
| — | −149 | −500 | 233 | 43 | −381 | 399 | 106 | −626 | 210 | −466 | −720 | 275 | 394 | 45 | 96 | 359 | 117 | −369 | −294 | −249 | |
| — | −16 | −7108 | −8150 | −894 | −1115 | −701 | −1378 | * | * | | | | | | | | | | | | |
| 318(K) | 2 | −2257 | −1073 | −374 | −2740 | −1908 | −278 | −2339 | 2328 | −2192 | −1373 | −562 | −1953 | 2273 | 1344 | −952 | −933 | −1980 | −2234 | −1799 | 324 |
| — | −149 | −500 | 233 | 43 | −381 | 399 | 106 | −626 | 210 | −466 | −720 | 275 | 394 | 45 | 96 | 359 | 117 | −369 | −294 | −249 | |
| — | −16 | −7108 | −8150 | −894 | −1115 | −701 | −1378 | * | * | | | | | | | | | | | | |
| 319(Y) | −3482 | −2868 | −3701 | −3919 | 238 | −3552 | −1112 | −3000 | −3638 | −2516 | −2526 | −3027 | −3772 | −3101 | −3341 | −3418 | −3527 | −3071 | −441 | 4711 | 325 |
| — | −149 | −500 | 233 | 43 | −381 | 399 | 106 | −626 | 210 | −466 | −720 | 275 | 394 | 45 | 96 | 359 | 117 | −369 | −294 | −249 | |
| — | −16 | −7108 | −8150 | −894 | −1115 | −701 | −1378 | * | * | | | | | | | | | | | | |
| 320(M) | −1559 | −1267 | −3829 | −3380 | −1103 | −3357 | −2655 | 805 | −3067 | −64 | 3046 | −3065 | −3326 | −2779 | −3011 | −2591 | −1556 | 2855 | −2312 | −1998 | 326 |
| — | −149 | −500 | 233 | 43 | −381 | 399 | 106 | −626 | 210 | −466 | −720 | 275 | 394 | 45 | 96 | 359 | 117 | −369 | −294 | −249 | |
| — | −16 | −7108 | −8150 | −894 | −1115 | −701 | −1378 | * | * | | | | | | | | | | | | |
| 321(M) | 1225 | −469 | −2256 | −1679 | 1656 | −1926 | −870 | 90 | −1396 | −210 | 2763 | −1424 | −2028 | −1129 | −1411 | −1008 | 712 | 154 | −951 | −586 | 327 |
| — | −149 | −500 | 233 | 43 | −381 | 399 | 106 | −626 | 210 | −466 | −720 | 275 | 394 | 45 | 96 | 359 | 117 | −369 | −294 | −249 | |
| — | −16 | −7108 | −8150 | −894 | −1115 | −701 | −1378 | * | * | | | | | | | | | | | | |
| 322(T) | −738 | −2094 | −84 | 1704 | −2416 | −1495 | −317 | −2135 | 61 | −2127 | −1275 | −163 | −1704 | 1857 | −405 | −613 | 1930 | −1734 | −2331 | −1668 | 328 |
| — | −149 | −500 | 233 | 43 | −381 | 399 | 106 | −626 | 210 | −466 | −720 | 275 | 394 | 45 | 96 | 359 | 117 | −369 | −294 | −249 | |
| — | −16 | −7108 | −8150 | −894 | −1115 | −701 | −1378 | * | * | | | | | | | | | | | | |
| 323(D) | −1746 | −3458 | 3540 | 90 | −3744 | −1650 | −1081 | −3767 | −1381 | −3662 | −3036 | 1386 | −2211 | −772 | −2239 | −1429 | −1850 | −3226 | −3765 | −2789 | 329 |
| — | −149 | −500 | 233 | 43 | −381 | 399 | 106 | −626 | 210 | −466 | −720 | 275 | 394 | 45 | 96 | 359 | 117 | −369 | −294 | −249 | |
| — | −16 | −7108 | −8150 | −894 | −1115 | −701 | −1378 | * | * | | | | | | | | | | | | |
| 324(L) | −2451 | −1983 | −4707 | −4186 | −582 | −4409 | −3259 | 1510 | −3884 | 2778 | 592 | −4069 | −3865 | −3091 | −3590 | −3698 | −2355 | −150 | −2226 | −2214 | 330 |
| — | −149 | −500 | 233 | 43 | −381 | 399 | 106 | −626 | 210 | −466 | −720 | 275 | 394 | 45 | 96 | 359 | 117 | −369 | −294 | −249 | |
| — | −16 | −7108 | −8150 | −894 | −1115 | −701 | −1378 | * | * | | | | | | | | | | | | |
| 325(H) | −2923 | −2573 | −2959 | −2926 | 826 | −3449 | 4553 | −2508 | −2463 | −2054 | −1948 | −2279 | −3499 | −2191 | −2397 | −2761 | −2855 | −2540 | 123 | 2920 | 331 |
| — | −149 | −500 | 233 | 43 | −381 | 399 | 106 | −626 | 210 | −466 | −720 | 275 | 394 | 45 | 96 | 359 | 117 | −369 | −294 | −249 | |
| — | −16 | −7108 | −8150 | −894 | −1115 | −701 | −1378 | * | * | | | | | | | | | | | | |
| 326(K) | 373 | −1957 | −342 | 1025 | −2297 | −1472 | −98 | −2018 | 2111 | −1954 | −1056 | 906 | −1570 | 352 | 685 | −424 | −473 | −1592 | −2105 | −1469 | 332 |
| — | −149 | −500 | 233 | 43 | −381 | 399 | 106 | −626 | 210 | −466 | −720 | 275 | 394 | 45 | 96 | 359 | 117 | −369 | −294 | −249 | |
| — | −16 | −7108 | −8150 | −894 | −1115 | −701 | −1378 | * | * | | | | | | | | | | | | |
| 327(V) | 1739 | −1008 | −3509 | −3043 | −1376 | −3028 | −2406 | 1765 | −2807 | −615 | −334 | −2718 | −3093 | −2585 | −2823 | −2226 | −1263 | 2376 | −2322 | −1931 | 333 |
| — | −149 | −500 | 233 | 43 | −381 | 399 | 106 | −626 | 210 | −466 | −720 | 275 | 394 | 45 | 96 | 359 | 117 | −369 | −294 | −249 | |
| — | −16 | −7108 | −8150 | −894 | −1115 | −701 | −1378 | * | * | | | | | | | | | | | | |
| 328(G) | −2594 | −2690 | −3304 | −3623 | −4328 | 3747 | −3462 | −4761 | −3953 | −4671 | −4212 | −3320 | −3352 | −3748 | −3779 | −2839 | −2981 | −4004 | −3668 | −4222 | 334 |
| — | −149 | −500 | 233 | 43 | −381 | 399 | 106 | −626 | 210 | −466 | −720 | 275 | 394 | 45 | 96 | 359 | 117 | −369 | −294 | −249 | |
| — | −16 | −7108 | −8150 | −894 | −1115 | −701 | −1378 | * | * | | | | | | | | | | | | |
| 329(G) | −2594 | −2690 | −3304 | −3623 | −4328 | 3747 | −3462 | −4761 | −3953 | −4671 | −4212 | −3320 | −3352 | −3748 | −3779 | −2839 | −2981 | −4004 | −3668 | −4222 | 335 |
| — | −149 | −500 | 233 | 43 | −381 | 399 | 106 | −626 | 210 | −466 | −720 | 275 | 394 | 45 | 96 | 359 | 117 | −369 | −294 | −249 | |
| — | −16 | −7108 | −8150 | −894 | −1115 | −701 | −1378 | * | * | | | | | | | | | | | | |
| 330(I) | −1758 | −1302 | −4331 | −3970 | −1756 | −4054 | −3748 | 2976 | −3840 | −603 | −533 | −3731 | −3877 | −3693 | −3914 | −3372 | −1750 | 2505 | −3265 | −2824 | 336 |
| — | −149 | −500 | 233 | 43 | −381 | 399 | 106 | −626 | 210 | −466 | −720 | 275 | 394 | 45 | 96 | 359 | 117 | −369 | −294 | −249 | |
| — | −16 | −7108 | −8150 | −894 | −1115 | −701 | −1378 | * | * | | | | | | | | | | | | |
| 331(P) | −2931 | −2878 | −3420 | −3706 | −4181 | −2925 | −3468 | −4621 | −3859 | −4490 | −4165 | −3491 | 4225 | −3781 | −3695 | −3182 | −3279 | −4087 | −3594 | −4064 | 337 |
| — | −149 | −500 | 233 | 43 | −381 | 399 | 106 | −626 | 210 | −466 | −720 | 275 | 394 | 45 | 96 | 359 | 117 | −369 | −294 | −249 | |
| — | −16 | −7108 | −8150 | −894 | −1115 | −701 | −1378 | * | * | | | | | | | | | | | | |
| 332(Q) | 1795 | −1440 | −730 | −492 | −2453 | 682 | −812 | −2151 | −508 | −2256 | −1426 | −624 | −1796 | 2666 | −901 | −590 | −689 | −1636 | −2510 | −1971 | 338 |
| — | −149 | −500 | 233 | 43 | −381 | 399 | 106 | −626 | 210 | −466 | −720 | 275 | 394 | 45 | 96 | 359 | 117 | −369 | −294 | −249 | |
| — | −16 | −7108 | −8150 | −894 | −1115 | −701 | −1378 | * | * | | | | | | | | | | | | |
| 333(V) | −1771 | −1603 | −3750 | −3689 | −2037 | −3050 | −3231 | 403 | −3479 | −1154 | −1076 | −3246 | −3399 | −3383 | −3437 | −2628 | −1917 | 3536 | −3074 | −2677 | 339 |
| — | −149 | −500 | 233 | 43 | −381 | 399 | 106 | −626 | 210 | −466 | −720 | 275 | 394 | 45 | 96 | 359 | 117 | −369 | −294 | −249 | |
| — | −16 | −7108 | −8150 | −894 | −1115 | −701 | −1378 | * | * | | | | | | | | | | | | |
| 334(M) | −2355 | −1988 | −4343 | −3834 | −504 | −4051 | −2868 | 105 | −3385 | 1451 | 4460 | −3680 | −3671 | −2806 | −3171 | −3327 | −2274 | −474 | −2039 | −1925 | 340 |
| — | −149 | −500 | 233 | 43 | −381 | 399 | 106 | −626 | 210 | −466 | −720 | 275 | 394 | 45 | 96 | 359 | 117 | −369 | −294 | −249 | |
| — | −16 | −7108 | −8150 | −894 | −1115 | −701 | −1378 | * | * | | | | | | | | | | | | |
| 335(K) | −2620 | −2961 | −2461 | −2046 | −3743 | −2791 | −1570 | −3603 | 3784 | −3387 | −2839 | −2048 | −3039 | −1260 | −465 | −2604 | −2536 | −3331 | −3001 | −2988 | 341 |
| — | −149 | −500 | 233 | 43 | −381 | 399 | 106 | −626 | 210 | −466 | −720 | 275 | 394 | 45 | 96 | 359 | 117 | −369 | −294 | −249 | |
| — | −16 | −7108 | −8150 | −894 | −1115 | −701 | −1378 | * | * | | | | | | | | | | | | |
| 336(Y) | −1187 | −974 | −3186 | −2638 | −117 | −2732 | −1255 | 1905 | −2270 | 73 | 1977 | −2217 | −2699 | −1882 | −2144 | −1841 | −1124 | 71 | −907 | 3254 | 342 |
| — | −149 | −500 | 233 | 43 | −381 | 399 | 106 | −626 | 210 | −466 | −720 | 275 | 394 | 45 | 96 | 359 | 117 | −369 | −294 | −249 | |
| — | −16 | −7108 | −8150 | −894 | −1115 | −701 | −1378 | * | * | | | | | | | | | | | | |
| 337(L) | −2871 | −2457 | −4231 | −4103 | −1033 | −3803 | −3165 | −541 | −3734 | 3130 | −31 | −3935 | −3797 | −3286 | −3484 | −3713 | −2869 | −1136 | −2394 | −2220 | 343 |
| — | −149 | −500 | 233 | 43 | −381 | 399 | 106 | −626 | 210 | −466 | −720 | 275 | 394 | 45 | 96 | 359 | 117 | −369 | −294 | −249 | |
| — | −16 | −7108 | −8150 | −894 | −1115 | −701 | −1378 | * | * | | | | | | | | | | | | |
| 338(L) | −2871 | −2457 | −4231 | −4103 | −1033 | −3803 | −3165 | −541 | −3734 | 3130 | −31 | −3935 | −3797 | −3286 | −3484 | −3713 | −2869 | −1136 | −2394 | −2220 | 344 |
| — | −149 | −500 | 233 | 43 | −381 | 399 | 106 | −626 | 210 | −466 | −720 | 275 | 394 | 45 | 96 | 359 | 117 | −369 | −294 | −249 | |
| — | −16 | −7108 | −8150 | −894 | −1115 | −701 | −1378 | * | * | | | | | | | | | | | | |
| 339(K) | −864 | −1785 | −860 | −366 | −2128 | −1763 | −407 | −1612 | 2624 | −1800 | −1045 | 629 | −1900 | −28 | 62 | −851 | −805 | 1127 | −2064 | −1581 | 345 |
| — | −149 | −500 | 233 | 43 | −381 | 399 | 106 | −626 | 210 | −466 | −720 | 275 | 394 | 45 | 96 | 359 | 117 | −369 | −294 | −249 | |
| — | −16 | −7108 | −8150 | −894 | −1115 | −701 | −1378 | * | * | | | | | | | | | | | | |
| 340(N) | 602 | −1686 | −275 | 1008 | −1926 | −1415 | 1528 | −1618 | 244 | −1673 | −815 | 1897 | −1530 | 299 | −244 | −371 | −391 | 322 | −1934 | −1306 | 346 |
| — | −149 | −500 | 233 | 43 | −381 | 399 | 106 | −626 | 210 | −466 | −720 | 275 | 394 | 45 | 96 | 359 | 117 | −369 | −294 | −249 | |
| — | −16 | −7108 | −8150 | −894 | −1115 | −701 | −1378 | * | * | | | | | | | | | | | | |
| 341(G) | −1709 | −2639 | 1362 | −690 | −3785 | 3257 | −1671 | −3805 | −1946 | −3792 | −3137 | −980 | −2480 | −1424 | −2576 | −1630 | −1936 | −3150 | −3628 | −3155 | 347 |
| — | −149 | −500 | 233 | 43 | −381 | 399 | 106 | −626 | 210 | −466 | −720 | 275 | 394 | 45 | 96 | 359 | 117 | −369 | −294 | −249 | |
| — | −16 | −7108 | −8150 | −894 | −1115 | −701 | −1378 | * | * | | | | | | | | | | | | |
| 342(F) | −942 | −799 | −2828 | −2226 | 1797 | −2476 | −1269 | 1109 | 581 | 1793 | 516 | −1952 | −2453 | −1557 | −1815 | −1558 | −875 | 52 | −1138 | −794 | 348 |
| — | −149 | −500 | 233 | 43 | −381 | 399 | 106 | −626 | 210 | −466 | −720 | 275 | 394 | 45 | 96 | 359 | 117 | −369 | −294 | −249 | |
| — | −16 | −7108 | −8150 | −894 | −1115 | −701 | −1378 | * | * | | | | | | | | | | | | |
| 343(L) | −2451 | −1983 | −4707 | −4186 | −582 | −4409 | −3259 | 1510 | −3884 | 2778 | 592 | −4069 | −3865 | −3091 | −3590 | −3698 | −2355 | −150 | −2226 | −2214 | 349 |
| — | −149 | −500 | 233 | 43 | −381 | 399 | 106 | −626 | 210 | −466 | −720 | 275 | 394 | 45 | 96 | 359 | 117 | −369 | −294 | −249 | |
| — | −16 | −7108 | −8150 | −894 | −1115 | −701 | −1378 | * | * | | | | | | | | | | | | |
| 344(H) | −3205 | −3079 | −2723 | −2890 | −2110 | −3046 | 5295 | −4135 | −2617 | −3813 | −3561 | −2886 | −3482 | −2833 | −2620 | −3291 | −3356 | −3895 | −2397 | −1681 | 350 |
| — | −149 | −500 | 233 | 43 | −381 | 399 | 106 | −626 | 210 | −466 | −720 | 275 | 394 | 45 | 96 | 359 | 117 | −369 | −294 | −249 | |
| — | −16 | −7108 | −8150 | −894 | −1115 | −701 | −1378 | * | * | | | | | | | | | | | | |
| 345(G) | −2594 | −2690 | −3304 | −3623 | −4328 | 3747 | −3462 | −4761 | −3953 | −4671 | −4212 | −3320 | −3352 | −3748 | −3779 | −2839 | −2981 | −4004 | −3668 | −4222 | 351 |
| — | −149 | −500 | 233 | 43 | −381 | 399 | 106 | −626 | 210 | −466 | −720 | 275 | 394 | 45 | 96 | 359 | 117 | −369 | −294 | −249 | |
| — | −16 | −7108 | −8150 | −894 | −1115 | −701 | −1378 | * | * | | | | | | | | | | | | |
| 346(D) | −2784 | −3432 | 4016 | −1200 | −4140 | −2466 | −2197 | −4505 | −2621 | −4365 | −3956 | −1551 | −3014 | −2039 | −3232 | −2593 | −2938 | −4046 | −3710 | −3552 | 352 |
| — | −149 | −500 | 233 | 43 | −381 | 399 | 106 | −626 | 210 | −466 | −720 | 275 | 394 | 45 | 96 | 359 | 117 | −369 | −294 | −249 | |
| — | −16 | −7108 | −8150 | −894 | −1115 | −701 | −1378 | * | * | | | | | | | | | | | | |
| 347(C) | 774 | 4452 | −2162 | −1688 | −1962 | −1478 | −1302 | −1474 | −944 | −1796 | −1088 | −1351 | −1979 | −1147 | 1684 | −732 | −719 | −1116 | −2225 | −1881 | 353 |
| — | −149 | −500 | 233 | 43 | −381 | 399 | 106 | −626 | 210 | −466 | −720 | 275 | 394 | 45 | 96 | 359 | 117 | −369 | −294 | −249 | |
| — | −16 | −7108 | −8150 | −894 | −1115 | −701 | −1378 | * | * | | | | | | | | | | | | |
| 348(L) | −2387 | −1922 | −4674 | −4155 | −617 | −4366 | −3250 | 1889 | −3865 | 2650 | 558 | −4023 | −3847 | −3098 | −3586 | −3647 | −2296 | −38 | −2247 | −2224 | 354 |
| — | −149 | −500 | 233 | 43 | −381 | 399 | 106 | −626 | 210 | −466 | −720 | 275 | 394 | 45 | 96 | 359 | 117 | −369 | −294 | −249 | |
| — | −16 | −7108 | −8150 | −894 | −1115 | −701 | −1378 | * | * | | | | | | | | | | | | |
| 349(T) | −1213 | −1674 | −2755 | −2906 | −3163 | −1922 | −2659 | −2698 | −2788 | −3105 | −2612 | −2311 | −2600 | −2708 | −2753 | −1463 | 3819 | −2197 | −3286 | −3156 | 355 |
| — | −149 | −500 | 233 | 43 | −381 | 399 | 106 | −626 | 210 | −466 | −720 | 275 | 394 | 45 | 96 | 359 | 117 | −369 | −294 | −249 | |
| — | −16 | −7108 | −8150 | −894 | −1115 | −701 | −1378 | * | * | | | | | | | | | | | | |
| 350(C) | −1489 | 2972 | −4007 | −3563 | −1524 | −3541 | −2939 | 2612 | −3350 | −617 | −413 | −3224 | −3470 | −3129 | −3335 | −2770 | −1475 | 2269 | −2657 | −2248 | 356 |
| — | −149 | −500 | 233 | 43 | −381 | 399 | 106 | −626 | 210 | −466 | −720 | 275 | 394 | 45 | 96 | 359 | 117 | −369 | −294 | −249 | |
| — | −16 | −7108 | −8150 | −894 | −1115 | −701 | −1378 | * | * | | | | | | | | | | | | |
| 351(T) | −364 | −979 | −2232 | −2250 | −2904 | −1245 | −2090 | −2559 | −2191 | −2881 | −2075 | −1571 | −1964 | −1991 | −2260 | 905 | 3428 | −1762 | −3159 | −2858 | 357 |
| — | −149 | −500 | 233 | 43 | −381 | 399 | 106 | −626 | 210 | −466 | −720 | 275 | 394 | 45 | 96 | 359 | 117 | −369 | −294 | −249 | |
| — | −16 | −7108 | −8150 | −894 | −1115 | −701 | −1378 | * | * | | | | | | | | | | | | |
| 352(G) | −2594 | −2690 | −3304 | −3623 | −4328 | 3747 | −3462 | −4761 | −3953 | −4671 | −4212 | −3320 | −3352 | −3748 | −3779 | −2839 | −2981 | −4004 | −3668 | −4222 | 358 |
| — | −149 | −500 | 233 | 43 | −381 | 399 | 106 | −626 | 210 | −466 | −720 | 275 | 394 | 45 | 96 | 359 | 117 | −369 | −294 | −249 | |
| — | −16 | −7108 | −8150 | −894 | −1115 | −701 | −1378 | * | * | | | | | | | | | | | | |
| 353(K) | −1716 | −2632 | −2004 | −1008 | −3336 | −2379 | −444 | −2764 | 2775 | −2484 | −1756 | −1035 | −2357 | 2151 | 1811 | −1592 | −1477 | −2481 | −2391 | −2172 | 359 |
| — | −149 | −500 | 233 | 43 | −381 | 399 | 106 | −626 | 210 | −466 | −720 | 275 | 394 | 45 | 96 | 359 | 117 | −369 | −294 | −249 | |
| — | −16 | −7108 | −8150 | −894 | −1115 | −701 | −1378 | * | * | | | | | | | | | | | | |
| 354(T) | −1213 | −1674 | −2755 | −2906 | −3163 | −1922 | −2659 | −2698 | −2788 | −3105 | −2612 | −2311 | −2600 | −2708 | −2753 | −1463 | 3819 | −2197 | −3286 | −3156 | 360 |
| — | −149 | −500 | 233 | 43 | −381 | 399 | 106 | −626 | 210 | −466 | −720 | 275 | 394 | 45 | 96 | 359 | 117 | −369 | −294 | −249 | |
| — | −16 | −7108 | −8150 | −894 | −1115 | −701 | −1378 | * | * | | | | | | | | | | | | |
| 355(V) | −1771 | −1339 | −4275 | −3816 | −1235 | −3919 | −3194 | 2139 | −3617 | 1520 | −66 | −3558 | −3681 | −3244 | −3547 | −3164 | −1733 | 2390 | −2634 | −2369 | 361 |
| — | −149 | −500 | 233 | 43 | −381 | 399 | 106 | −626 | 210 | −466 | −720 | 275 | 394 | 45 | 96 | 359 | 117 | −369 | −294 | −249 | |
| — | −16 | −7108 | −8150 | −894 | −1115 | −701 | −1378 | * | * | | | | | | | | | | | | |
| 356(A) | 3438 | −1472 | −2846 | −3040 | −3287 | −1726 | −2735 | −2840 | −3028 | −3257 | −2662 | −2236 | −2447 | −2798 | −2944 | −1216 | −1387 | −2183 | −3405 | −3320 | 362 |
| — | −149 | −500 | 233 | 43 | −381 | 399 | 106 | −626 | 210 | −466 | −720 | 275 | 394 | 45 | 96 | 359 | 117 | −369 | −294 | −249 | |
| — | −16 | −7108 | −8150 | −894 | −1115 | −701 | −1378 | * | * | | | | | | | | | | | | |
| 357(E) | −2641 | −3308 | −896 | 3732 | −3966 | −2458 | −2043 | −4105 | −2128 | −4016 | −3555 | −1531 | −2959 | −1842 | −2560 | −2479 | −2750 | −3722 | −3563 | −3385 | 363 |
| — | −149 | −500 | 233 | 43 | −381 | 399 | 106 | −626 | 210 | −466 | −720 | 275 | 394 | 45 | 96 | 359 | 117 | −369 | −294 | −249 | |
| — | −16 | −7108 | −8150 | −894 | −1115 | −701 | −1378 | * | * | | | | | | | | | | | | |
| 358(N) | −823 | −1917 | −96 | 1188 | −2187 | −1547 | −506 | −1711 | −265 | −1955 | −1191 | 2711 | −1815 | −144 | −747 | −757 | −815 | 1140 | −2297 | −1666 | 364 |
| — | −149 | −500 | 233 | 43 | −381 | 399 | 106 | −626 | 210 | −466 | −720 | 275 | 394 | 45 | 96 | 359 | 117 | −369 | −294 | −249 | |
| — | −16 | −7108 | −8150 | −894 | −1115 | −701 | −1378 | * | * | | | | | | | | | | | | |
| 359(L) | −2153 | −1779 | −4360 | −3884 | −675 | −3965 | −3012 | 392 | −3561 | 2726 | 467 | −3673 | −3662 | −2955 | −3355 | −3239 | −2102 | 1281 | −2207 | −2099 | 365 |
| — | −149 | −500 | 233 | 43 | −381 | 399 | 106 | −626 | 210 | −466 | −720 | 275 | 394 | 45 | 96 | 359 | 117 | −369 | −294 | −249 | |
| — | −16 | −7108 | −8150 | −894 | −1115 | −701 | −1378 | * | * | | | | | | | | | | | | |
| 360(E) | 1136 | −2084 | −175 | 2027 | −2436 | −1510 | −274 | −2147 | 1525 | −2118 | −1254 | −175 | −1692 | 152 | −251 | −593 | −670 | −1736 | −2296 | −1650 | 366 |
| — | −149 | −500 | 233 | 43 | −381 | 399 | 106 | −626 | 210 | −466 | −720 | 275 | 394 | 45 | 96 | 359 | 117 | −369 | −294 | −249 | |
| — | −16 | −7108 | −8150 | −894 | −1115 | −701 | −1378 | * | * | | | | | | | | | | | | |
| 361(H) | 893 | −1761 | 1357 | 214 | −2092 | −1387 | 1862 | −1810 | 229 | −1825 | −942 | −83 | −1527 | 293 | −273 | 640 | 793 | −1409 | −2050 | −1397 | 367 |
| — | −149 | −500 | 233 | 43 | −381 | 399 | 106 | −626 | 210 | −466 | −720 | 275 | 394 | 45 | 96 | 359 | 117 | −369 | −294 | −249 | |
| — | −16 | −7108 | −8150 | −894 | −1115 | −701 | −1378 | * | * | | | | | | | | | | | | |
| 362(I) | 608 | −458 | −2776 | −2176 | 1666 | −2202 | −1113 | 1712 | −1836 | −222 | 338 | −1782 | −2245 | −1512 | −1731 | −1292 | 867 | 1366 | −1036 | −684 | 368 |
| — | −149 | −500 | 233 | 43 | −381 | 399 | 106 | −626 | 210 | −466 | −720 | 275 | 394 | 45 | 96 | 359 | 117 | −369 | −294 | −249 | |
| — | −16 | −7108 | −8150 | −894 | −1115 | −701 | −1378 | * | * | | | | | | | | | | | | |
| 363(P) | −922 | −1912 | 1681 | −141 | −2123 | −1604 | −687 | −1787 | −550 | 187 | −1245 | −427 | 2677 | −363 | −1049 | −882 | −947 | −1524 | −2338 | −1711 | 369 |
| — | −149 | −500 | 233 | 43 | −381 | 399 | 106 | −626 | 210 | −466 | −720 | 275 | 394 | 45 | 96 | 359 | 117 | −369 | −294 | −249 | |
| — | −16 | −7108 | −8150 | −894 | −1115 | −701 | −1378 | * | * | | | | | | | | | | | | |
| 364(D) | −1692 | −3605 | 3364 | 1256 | −3770 | −1599 | −957 | −3700 | −1216 | −3569 | −2909 | 1025 | −2138 | −628 | −2083 | −1346 | −1761 | −3174 | −3765 | −2738 | 370 |
| — | −149 | −500 | 233 | 43 | −381 | 399 | 106 | −626 | 210 | −466 | −720 | 275 | 394 | 45 | 96 | 359 | 117 | −369 | −294 | −249 | |
| — | −16 | −7108 | −8150 | −894 | −1115 | −701 | −1378 | * | * | | | | | | | | | | | | |
| 365(Q) | −877 | −1646 | −633 | 499 | −1610 | −1781 | −505 | −1210 | −63 | 1648 | −649 | −558 | −1931 | 2241 | −360 | −907 | −814 | −1097 | −1882 | −1385 | 371 |
| — | −149 | −500 | 233 | 43 | −381 | 399 | 106 | −626 | 210 | −466 | −720 | 275 | 394 | 45 | 96 | 359 | 117 | −369 | −294 | −249 | |
| — | −16 | −7108 | −8150 | −894 | −1115 | −701 | −1378 | * | * | | | | | | | | | | | | |
| 366(P) | −648 | −2019 | 1139 | 203 | −2354 | −1436 | −285 | −2089 | 29 | −2086 | −1217 | −114 | 1965 | 1445 | −492 | −529 | 1244 | −1672 | −2300 | −1616 | 372 |
| — | −149 | −500 | 233 | 43 | −381 | 399 | 106 | −626 | 210 | −466 | −720 | 275 | 394 | 45 | 96 | 359 | 117 | −369 | −294 | −249 | |
| — | −16 | −7108 | −8150 | −894 | −1115 | −701 | −1378 | * | * | | | | | | | | | | | | |
| 367(R) | −422 | −1009 | −851 | −304 | 1406 | −1496 | −183 | −740 | 147 | −894 | −230 | −440 | 775 | 21 | 2009 | −539 | −381 | −568 | −1136 | −521 | 373 |
| — | −149 | −500 | 233 | 43 | −381 | 399 | 106 | −626 | 210 | −466 | −720 | 275 | 394 | 45 | 96 | 359 | 117 | −369 | −294 | −249 | |
| — | −23 | −6560 | −7602 | −894 | −1115 | −341 | 2249 | * | * | | | | | | | | | | | | |
| 368(D) | 1472 | −1668 | 1835 | −70 | −2356 | −1385 | −511 | −2062 | −246 | −2128 | −1275 | −318 | 1353 | −118 | −746 | −526 | 425 | −1602 | −2380 | −1752 | 374 |
| — | −149 | −500 | 233 | 43 | −381 | 399 | 106 | −626 | 210 | −466 | −720 | 275 | 394 | 45 | 96 | 359 | 117 | −369 | −294 | −249 | |
| — | −16 | −7108 | −8150 | −894 | −1115 | −701 | −1378 | * | * | | | | | | | | | | | | |
| 369(G) | −1044 | −2230 | 2141 | −100 | −3222 | 2291 | −982 | −3045 | −1033 | −3050 | −2258 | −395 | −1985 | −644 | −1669 | 858 | −1207 | −2428 | −3250 | −2493 | 375 |
| — | −149 | −500 | 233 | 43 | −381 | 399 | 106 | −626 | 210 | −466 | −720 | 275 | 394 | 45 | 96 | 359 | 117 | −369 | −294 | −249 | |
| — | −16 | −7108 | −8150 | −894 | −1115 | −701 | −1378 | * | * | | | | | | | | | | | | |
| 370(Q) | −2562 | −2904 | −1886 | −1971 | −3251 | −2661 | −2079 | −3690 | −1565 | −3469 | −3081 | −2107 | −3091 | 4371 | −1665 | −2585 | −2674 | −3411 | −3077 | −2821 | 376 |
| — | −149 | −500 | 233 | 43 | −381 | 399 | 106 | −626 | 210 | −466 | −720 | 275 | 394 | 45 | 96 | 359 | 117 | −369 | −294 | −249 | |
| — | −16 | −7108 | −8150 | −894 | −1115 | −701 | −1378 | * | * | | | | | | | | | | | | |
| 371(D) | −1275 | −2955 | 2862 | 1330 | −3205 | −1556 | −670 | −3029 | 1509 | −2936 | −2141 | −158 | −1955 | −290 | −1213 | −1025 | −1281 | −2554 | −3111 | −2272 | 377 |
| — | −149 | −500 | 233 | 43 | −381 | 399 | 106 | −626 | 210 | −466 | −720 | 275 | 394 | 45 | 96 | 359 | 117 | −369 | −294 | −249 | |
| — | −16 | −7108 | −8150 | −894 | −1115 | −701 | −1378 | * | * | | | | | | | | | | | | |
| 372(V) | −1738 | −1298 | −4281 | −3921 | −1737 | −3979 | −3665 | 1917 | −3774 | −601 | −528 | −3671 | −3834 | −3628 | −3843 | −3293 | −1735 | 3205 | −3215 | −2770 | 378 |
| — | −149 | −500 | 233 | 43 | −381 | 399 | 106 | −626 | 210 | −466 | −720 | 275 | 394 | 45 | 96 | 359 | 117 | −369 | −294 | −249 | |
| — | −16 | −7108 | −8150 | −894 | −1115 | −701 | −1378 | * | * | | | | | | | | | | | | |
| 373(I) | −2091 | −1746 | −3971 | −3840 | −1676 | −3532 | −3289 | 3684 | −3581 | −659 | −693 | −3562 | −3674 | −3445 | −3521 | −3194 | −2146 | 449 | −2877 | −2493 | 379 |
| — | −149 | −500 | 233 | 43 | −381 | 399 | 106 | −626 | 210 | −466 | −720 | 275 | 394 | 45 | 96 | 359 | 117 | −369 | −294 | −249 | |
| — | −16 | −7108 | −8150 | −894 | −1115 | −701 | −1378 | * | * | | | | | | | | | | | | |
| 374(M) | −584 | −1354 | −847 | −246 | −1467 | −1659 | 2505 | −1087 | 212 | −374 | 2571 | −449 | −1729 | 1171 | 1074 | −634 | −507 | −876 | −1617 | −1128 | 380 |
| — | −149 | −500 | 233 | 43 | −381 | 399 | 106 | −626 | 210 | −466 | −720 | 275 | 394 | 45 | 96 | 359 | 117 | −369 | −294 | −249 | |
| — | −16 | −7108 | −8150 | −894 | −1115 | −701 | −1378 | * | * | | | | | | | | | | | | |
| 375(P) | −910 | −2031 | −73 | 1195 | −2792 | −1488 | −794 | −2539 | −629 | −2588 | −1788 | −401 | 3005 | −439 | −1131 | 612 | −1014 | −2050 | −2815 | −2151 | 381 |
| — | −149 | −500 | 233 | 43 | −381 | 399 | 106 | −626 | 210 | −466 | −720 | 275 | 394 | 45 | 96 | 359 | 117 | −369 | −294 | −249 | |
| — | −16 | −7108 | −8150 | −894 | −1115 | −701 | −1378 | * | * | | | | | | | | | | | | |
| 376(W) | −1588 | −1300 | −3783 | −3197 | −329 | −3245 | −1926 | 2071 | −2827 | 1901 | 558 | −2822 | −3072 | −2297 | −2616 | −2381 | −1508 | −111 | 3483 | −1042 | 382 |
| — | −149 | −500 | 233 | 43 | −381 | 399 | 106 | −626 | 210 | −466 | −720 | 275 | 394 | 45 | 96 | 359 | 117 | −369 | −294 | −249 | |
| — | −16 | −7108 | −8150 | −894 | −1115 | −701 | −1378 | * | * | | | | | | | | | | | | |
| 377(E) | −1024 | −2640 | 1844 | 2310 | −2908 | −1498 | −505 | −2711 | −344 | −2636 | −1791 | −107 | −1824 | 1521 | −957 | 207 | −1011 | −2243 | −2817 | −2021 | 383 |
| — | −149 | −500 | 233 | 43 | −381 | 399 | 106 | −626 | 210 | −466 | −720 | 275 | 394 | 45 | 96 | 359 | 117 | −369 | −294 | −249 | |
| — | −16 | −7108 | −8150 | −894 | −1115 | −701 | −1378 | * | * | | | | | | | | | | | | |
| 378(N) | −826 | −2349 | 1089 | 227 | −2651 | −1487 | −341 | −2416 | 1494 | −2346 | −1475 | 2601 | −1724 | 1005 | −522 | −657 | −787 | −1968 | −2511 | −1791 | 384 |
| — | −149 | −500 | 233 | 43 | −381 | 399 | 106 | −626 | 210 | −466 | −720 | 275 | 394 | 45 | 96 | 359 | 117 | −369 | −294 | −249 | |
| — | −16 | −7108 | −8150 | −894 | −1115 | −701 | −1378 | * | * | | | | | | | | | | | | |
| 379(P) | 1932 | −1116 | −2232 | −2301 | −3058 | −1358 | −2206 | −2706 | −2336 | −3009 | −2238 | −1674 | 3274 | −2114 | −2406 | −739 | −914 | −1913 | −3260 | −3019 | 385 |
| — | −149 | −500 | 233 | 43 | −381 | 399 | 106 | −626 | 210 | −466 | −720 | 275 | 394 | 45 | 96 | 359 | 117 | −369 | −294 | −249 | |
| — | −16 | −7108 | −8150 | −894 | −1115 | −701 | −1378 | * | * | | | | | | | | | | | | |
| 380(V) | −914 | −773 | −2713 | −2129 | −712 | −2505 | −1388 | 1452 | 1084 | 1324 | 204 | −1926 | −2507 | −1580 | −1808 | −1591 | −859 | 1713 | −1424 | −1081 | 386 |
| — | −149 | −500 | 233 | 43 | −381 | 399 | 106 | −626 | 210 | −466 | −720 | 275 | 394 | 45 | 96 | 359 | 117 | −369 | −294 | −249 | |
| — | −16 | −7108 | −8150 | −894 | −1115 | −701 | −1378 | * | * | | | | | | | | | | | | |
| 381(Y) | −1484 | −2331 | −1762 | −887 | −2436 | −2254 | −420 | −2325 | 2137 | −2195 | −1475 | −949 | −2258 | −39 | 1983 | −1411 | −1295 | −2075 | −2087 | 2868 | 387 |
| — | −149 | −500 | 233 | 43 | −381 | 399 | 106 | −626 | 210 | −466 | −720 | 275 | 394 | 45 | 96 | 359 | 117 | −369 | −294 | −249 | |
| — | −16 | −7108 | −8150 | −894 | −1115 | −701 | −1378 | * | * | | | | | | | | | | | | |
| 382(E) | 1256 | −1890 | −206 | 1353 | −2196 | −1401 | −89 | −1930 | 812 | −1898 | −996 | −45 | 547 | 1252 | −162 | −356 | −414 | −1507 | −2083 | −1416 | 388 |
| — | −149 | −500 | 233 | 43 | −381 | 399 | 106 | −626 | 210 | −466 | −720 | 275 | 394 | 45 | 96 | 359 | 117 | −369 | −294 | −249 | |
| — | −16 | −7108 | −8150 | −894 | −1115 | −701 | −1378 | * | * | | | | | | | | | | | | |
| 383(Q) | −752 | −2272 | 1586 | 1407 | −2561 | −1448 | −308 | −2329 | −23 | −2276 | −1396 | −71 | −1677 | 1749 | −577 | −590 | 1569 | −1881 | −2459 | −1727 | 389 |
| — | −149 | −500 | 233 | 43 | −381 | 399 | 106 | −626 | 210 | −466 | −720 | 275 | 394 | 45 | 96 | 359 | 117 | −369 | −294 | −249 | |
| — | −16 | −7108 | −8150 | −894 | −1115 | −701 | −1378 | * | * | | | | | | | | | | | | |
| 384(G) | −2594 | −2690 | −3304 | −3623 | −4328 | 3747 | −3462 | −4761 | −3953 | −4671 | −4212 | −3320 | −3352 | −3748 | −3779 | −2839 | −2981 | −4004 | −3668 | −4222 | 390 |
| — | −149 | −500 | 233 | 43 | −381 | 399 | 106 | −626 | 210 | −466 | −720 | 275 | 394 | 45 | 96 | 359 | 117 | −369 | −294 | −249 | |
| — | −16 | −7108 | −8150 | −894 | −1115 | −701 | −1378 | * | * | | | | | | | | | | | | |
| 385(H) | −964 | −2089 | −200 | −136 | −2264 | −1600 | 3833 | −2320 | −296 | −2338 | −1558 | 1362 | 1479 | −276 | −699 | −881 | −992 | −1924 | −2364 | −1652 | 391 |
| — | −149 | −500 | 233 | 43 | −381 | 399 | 106 | −626 | 210 | −466 | −720 | 275 | 394 | 45 | 96 | 359 | 117 | −369 | −294 | −249 | |
| — | −16 | −7108 | −8150 | −894 | −1115 | −701 | −1378 | * | * | | | | | | | | | | | | |
| 386(L) | −2451 | −1983 | −4707 | −4186 | −582 | −4409 | −3259 | 1510 | −3884 | 2778 | 592 | −4069 | −3865 | −3091 | −3590 | −3698 | −2355 | −150 | −2226 | −2214 | 392 |
| — | −149 | −500 | 233 | 43 | −381 | 399 | 106 | −626 | 210 | −466 | −720 | 275 | 394 | 45 | 96 | 359 | 117 | −369 | −294 | −249 | |
| — | −16 | −7108 | −8150 | −894 | −1115 | −701 | −1378 | * | * | | | | | | | | | | | | |
| 387(Q) | 1643 | −1017 | −1196 | −721 | −1189 | −1714 | −668 | 1336 | −497 | −907 | −297 | −823 | −1893 | 2044 | −794 | −784 | −569 | −339 | −1579 | −1135 | 393 |
| — | −149 | −500 | 233 | 43 | −381 | 399 | 106 | −626 | 210 | −466 | −720 | 275 | 394 | 45 | 96 | 359 | 117 | −369 | −294 | −249 | |
| — | −16 | −7108 | −8150 | −894 | −1115 | −701 | −1378 | * | * | | | | | | | | | | | | |
| 388(I) | −1760 | −1308 | −4323 | −3961 | −1730 | −4039 | −3721 | 3156 | −3825 | −575 | −512 | −3720 | −3867 | −3669 | −3893 | −3356 | −1753 | 2241 | −3236 | −2802 | 394 |
| — | −149 | −500 | 233 | 43 | −381 | 399 | 106 | −626 | 210 | −466 | −720 | 275 | 394 | 45 | 96 | 359 | 117 | −369 | −294 | −249 | |
| — | −16 | −7108 | −8150 | −894 | −1115 | −701 | −1378 | * | * | | | | | | | | | | | | |
| 389(L) | −2871 | −2457 | −4231 | −4103 | −1033 | −3803 | −3165 | −541 | −3734 | 3130 | −31 | −3935 | −3797 | −3286 | −3484 | −3713 | −2869 | −1136 | −2394 | −2220 | 395 |
| — | −149 | −500 | 233 | 43 | −381 | 399 | 106 | −626 | 210 | −466 | −720 | 275 | 394 | 45 | 96 | 359 | 117 | −369 | −294 | −249 | |
| — | −16 | −7108 | −8150 | −894 | −1115 | −701 | −1378 | * | * | | | | | | | | | | | | |
| 390(K) | −1259 | −2115 | −1267 | −676 | −970 | −2105 | 1794 | −2040 | 2549 | −1955 | −1282 | −808 | −2165 | −167 | 114 | −1192 | −1140 | −1801 | −1301 | 2517 | 396 |
| — | −149 | −500 | 233 | 43 | −381 | 399 | 106 | −626 | 210 | −466 | −720 | 275 | 394 | 45 | 96 | 359 | 117 | −369 | −294 | −249 | |
| — | −16 | −7108 | −8150 | −894 | −1115 | −701 | −1378 | * | * | | | | | | | | | | | | |
| 391(G) | −2594 | −2690 | −3304 | −3623 | −4328 | 3747 | −3462 | −4761 | −3953 | −4671 | −4212 | −3320 | −3352 | −3748 | −3779 | −2839 | −2981 | −4004 | −3668 | −4222 | 397 |
| — | −149 | −500 | 233 | 43 | −381 | 399 | 106 | −626 | 210 | −466 | −720 | 275 | 394 | 45 | 96 | 359 | 117 | −369 | −294 | −249 | |
| — | −16 | −7108 | −8150 | −894 | −1115 | −701 | −1378 | * | * | | | | | | | | | | | | |
| 392(N) | −2171 | −2655 | −1458 | −1748 | −3334 | −2364 | −2267 | −3943 | −2365 | −3936 | −3437 | 4205 | −2932 | −2205 | −2608 | −2224 | −2439 | −3392 | −3253 | −2909 | 398 |
| — | −149 | −500 | 233 | 43 | −381 | 399 | 106 | −626 | 210 | −466 | −720 | 275 | 394 | 45 | 96 | 359 | 117 | −369 | −294 | −249 | |
| — | −16 | −7108 | −8150 | −894 | −1115 | −701 | −1378 | * | * | | | | | | | | | | | | |
| 393(L) | −2871 | −2457 | −4231 | −4103 | −1033 | −3803 | −3165 | −541 | −3734 | 3130 | −31 | −3935 | −3797 | −3286 | −3484 | −3713 | −2869 | −1136 | −2394 | −2220 | 399 |
| — | −149 | −500 | 233 | 43 | −381 | 399 | 106 | −626 | 210 | −466 | −720 | 275 | 394 | 45 | 96 | 359 | 117 | −369 | −294 | −249 | |
| — | −16 | −7108 | −8150 | −894 | −1115 | −701 | −1378 | * | * | | | | | | | | | | | | |
| 394(A) | 3121 | −934 | −2489 | −2561 | −3081 | −1203 | −2295 | −2766 | −2533 | −3080 | −2234 | −1669 | −1953 | −2234 | −2533 | 936 | −746 | −1844 | −3331 | −3090 | 400 |
| — | −149 | −500 | 233 | 43 | −381 | 399 | 106 | −626 | 210 | −466 | −720 | 275 | 394 | 45 | 96 | 359 | 117 | −369 | −294 | −249 | |
| — | −16 | −7108 | −8150 | −894 | −1115 | −701 | −1378 | * | * | | | | | | | | | | | | |
| 395(E) | −522 | −1773 | −240 | 1676 | −2248 | −1396 | −289 | −1968 | 50 | −1989 | −1115 | −174 | 1198 | 131 | −448 | 1226 | 677 | −1538 | −2214 | −1565 | 401 |
| — | −149 | −500 | 233 | 43 | −381 | 399 | 106 | −626 | 210 | −466 | −720 | 275 | 394 | 45 | 96 | 359 | 117 | −369 | −294 | −249 | |
| — | −16 | −7108 | −8150 | −894 | −1115 | −701 | −1378 | * | * | | | | | | | | | | | | |
| 396(E) | −1481 | −3230 | 1425 | 2936 | −3481 | 751 | −843 | −3354 | −954 | −3256 | −2520 | −187 | −2057 | −492 | −1711 | −1193 | −1527 | −2852 | −3445 | −2523 | 402 |
| — | −149 | −500 | 233 | 43 | −381 | 399 | 106 | −626 | 210 | −466 | −720 | 275 | 394 | 45 | 96 | 359 | 117 | −369 | −294 | −249 | |
| — | −16 | −7108 | −8150 | −894 | −1115 | −701 | −1378 | * | * | | | | | | | | | | | | |
| 397(G) | −2594 | −2690 | −3304 | −3623 | −4328 | 3747 | −3462 | −4761 | −3953 | −4671 | −4212 | −3320 | −3352 | −3748 | −3779 | −2839 | −2981 | −4004 | −3668 | −4222 | 403 |
| — | −149 | −500 | 233 | 43 | −381 | 399 | 106 | −626 | 210 | −466 | −720 | 275 | 394 | 45 | 96 | 359 | 117 | −369 | −294 | −249 | |
| — | −16 | −7108 | −8150 | −894 | −1115 | −701 | −1378 | * | * | | | | | | | | | | | | |
| 398(A) | 2847 | −932 | −2454 | −2477 | −3066 | −1198 | −2236 | −2763 | −2439 | −3057 | −2202 | −1635 | −1940 | −2152 | −2471 | 1777 | −731 | −1840 | −3306 | −3056 | 404 |
| — | −149 | −500 | 233 | 43 | −381 | 399 | 106 | −626 | 210 | −466 | −720 | 275 | 394 | 45 | 96 | 359 | 117 | −369 | −294 | −249 | |
| — | −16 | −7108 | −8150 | −894 | −1115 | −701 | −1378 | * | * | | | | | | | | | | | | |
| 399(V) | −1771 | −1603 | −3750 | −3689 | −2037 | −3050 | −3231 | 403 | −3479 | −1154 | −1076 | −3246 | −3399 | −3383 | −3437 | −2628 | −1917 | 3536 | −3074 | −2677 | 405 |
| — | −149 | −500 | 233 | 43 | −381 | 399 | 106 | −626 | 210 | −466 | −720 | 275 | 394 | 45 | 96 | 359 | 117 | −369 | −294 | −249 | |
| — | −16 | −7108 | −8150 | −894 | −1115 | −701 | −1378 | * | * | | | | | | | | | | | | |
| 400(A) | 3438 | −1472 | −2846 | −3040 | −3287 | −1726 | −2735 | −2840 | −3028 | −3257 | −2662 | −2236 | −2447 | −2798 | −2944 | −1216 | −1387 | −2183 | −3405 | −3320 | 406 |
| — | −149 | −500 | 233 | 43 | −381 | 399 | 106 | −626 | 210 | −466 | −720 | 275 | 394 | 45 | 96 | 359 | 117 | −369 | −294 | −249 | |
| — | −16 | −7108 | −8150 | −894 | −1115 | −701 | −1378 | * | * | | | | | | | | | | | | |
| 401(K) | −2620 | −2961 | −2461 | −2046 | −3743 | −2791 | −1570 | −3603 | 3784 | −3387 | −2839 | −2048 | −3039 | −1260 | −465 | −2604 | −2536 | −3331 | −3001 | −2988 | 407 |
| — | −149 | −500 | 233 | 43 | −381 | 399 | 106 | −626 | 210 | −466 | −720 | 275 | 394 | 45 | 96 | 359 | 117 | −369 | −294 | −249 | |
| — | −16 | −7108 | −8150 | −894 | −1115 | −701 | −1378 | * | * | | | | | | | | | | | | |
| 402(I) | −1761 | −1312 | −4317 | −3954 | −1713 | −4027 | −3703 | 3225 | −3814 | −556 | −498 | −3712 | −3859 | −3653 | −3877 | −3344 | −1754 | 2110 | −3216 | −2787 | 408 |
| — | −149 | −500 | 233 | 43 | −381 | 399 | 106 | −626 | 210 | −466 | −720 | 275 | 394 | 45 | 96 | 359 | 117 | −369 | −294 | −249 | |
| — | −16 | −7108 | −8150 | −894 | −1115 | −701 | −1378 | * | * | | | | | | | | | | | | |
| 403(S) | −348 | −981 | −2200 | −2194 | −2989 | −1227 | −2073 | −2686 | −2157 | −2970 | −2136 | −1541 | −1946 | −1946 | −2253 | 3060 | 1398 | −1824 | −3217 | −2916 | 409 |
| — | −149 | −500 | 233 | 43 | −381 | 399 | 106 | −626 | 210 | −466 | −720 | 275 | 394 | 45 | 96 | 359 | 117 | −369 | −294 | −249 | |
| — | −16 | −7108 | −8150 | −894 | −1115 | −701 | −1378 | * | * | | | | | | | | | | | | |
| 404(G) | −2594 | −2690 | −3304 | −3623 | −4328 | 3747 | −3462 | −4761 | −3953 | −4671 | −4212 | −3320 | −3352 | −3748 | −3779 | −2839 | −2981 | −4004 | −3668 | −4222 | 410 |
| — | −149 | −500 | 233 | 43 | −381 | 399 | 106 | −626 | 210 | −466 | −720 | 275 | 394 | 45 | 96 | 359 | 117 | −369 | −294 | −249 | |
| — | −16 | −7108 | −8150 | −894 | −1115 | −701 | −1378 | * | * | | | | | | | | | | | | |
| 405(V) | −917 | −809 | −2556 | −1976 | −827 | −2491 | −1367 | 1339 | 1455 | 721 | 94 | −1841 | −2501 | −1487 | −1710 | −1570 | −863 | 2038 | −1514 | −1151 | 411 |
| — | −149 | −500 | 233 | 43 | −381 | 399 | 106 | −626 | 210 | −466 | −720 | 275 | 394 | 45 | 96 | 359 | 117 | −369 | −294 | −249 | |
| — | −16 | −7108 | −8150 | −894 | −1115 | −701 | −1378 | * | * | | | | | | | | | | | | |
| 406(K) | −1386 | −2643 | −447 | 1824 | −3108 | −1893 | −570 | −2762 | 2860 | −2616 | −1848 | −552 | −2117 | −166 | −3 | −1217 | −1300 | −2388 | −2647 | −2154 | 412 |
| — | −149 | −500 | 233 | 43 | −381 | 399 | 106 | −626 | 210 | −466 | −720 | 275 | 394 | 45 | 96 | 359 | 117 | −369 | −294 | −249 | |
| — | −16 | −7108 | −8150 | −894 | −1115 | −701 | −1378 | * | * | | | | | | | | | | | | |
| 407(N) | −537 | −1563 | −449 | −36 | −1889 | 1143 | −307 | −1529 | 932 | −1655 | −844 | 1794 | −1658 | 73 | −356 | −518 | −516 | 924 | −1962 | −1392 | 413 |
| — | −149 | −500 | 233 | 43 | −381 | 399 | 106 | −626 | 210 | −466 | −720 | 275 | 394 | 45 | 96 | 359 | 117 | −369 | −294 | −249 | |
| — | −16 | −7108 | −8150 | −894 | −1115 | −701 | −1378 | * | * | | | | | | | | | | | | |
| 408(P) | −894 | −2181 | −369 | 1705 | −2576 | −1650 | −357 | −2268 | 243 | −2210 | −1375 | −330 | 2093 | 63 | 1619 | −774 | −835 | −1876 | −2347 | −1769 | 414 |
| — | −149 | −500 | 233 | 43 | −381 | 399 | 106 | −626 | 210 | −466 | −720 | 275 | 394 | 45 | 96 | 359 | 117 | −369 | −294 | −249 | |
| — | −16 | −7108 | −8150 | −894 | −1115 | −701 | −1378 | * | * | | | | | | | | | | | | |
| 409(V) | −419 | −634 | −1376 | −807 | 1053 | −1737 | −499 | −198 | −623 | −505 | 178 | 600 | −1807 | −475 | 475 | 313 | −360 | 1389 | −1016 | 1303 | 415 |
| — | −149 | −500 | 233 | 43 | −381 | 399 | 106 | −626 | 210 | −466 | −720 | 275 | 394 | 45 | 96 | 359 | 117 | −369 | −294 | −249 | |
| — | −16 | −7108 | −8150 | −894 | −1115 | −701 | −1378 | * | * | | | | | | | | | | | | |
| 410(I) | −1282 | −1082 | −3022 | −2555 | 2426 | −2683 | 1767 | 2555 | −2191 | −443 | −88 | −2038 | −2692 | −1794 | −2075 | −1793 | −1220 | −317 | −361 | 552 | 416 |
| — | −149 | −500 | 233 | 43 | −381 | 399 | 106 | −626 | 210 | −466 | −720 | 275 | 394 | 45 | 96 | 359 | 117 | −369 | −294 | −249 | |
| — | −16 | −7108 | −8150 | −894 | −1115 | −701 | −1378 | * | * | | | | | | | | | | | | |
| 411(T) | −499 | −1595 | −431 | 966 | −1830 | −1487 | −185 | −1449 | 1092 | −1574 | −754 | −207 | −1601 | 213 | −206 | −458 | 2067 | 159 | −1877 | −1296 | 417 |
| — | −149 | −500 | 233 | 43 | −381 | 399 | 106 | −626 | 210 | −466 | −720 | 275 | 394 | 45 | 96 | 359 | 117 | −369 | −294 | −249 | |
| — | −16 | −7108 | −8150 | −894 | −1115 | −701 | −1378 | * | * | | | | | | | | | | | | |
| 412(G) | −2594 | −2690 | −3304 | −3623 | −4328 | 3747 | −3462 | −4761 | −3953 | −4671 | −4212 | −3320 | −3352 | −3748 | −3779 | −2839 | −2981 | −4004 | −3668 | −4222 | 418 |
| — | −149 | −500 | 233 | 43 | −381 | 399 | 106 | −626 | 210 | −466 | −720 | 275 | 394 | 45 | 96 | 359 | 117 | −369 | −294 | −249 | |
| — | −16 | −7108 | −8150 | −894 | −1115 | −701 | −1378 | * | * | | | | | | | | | | | | |
| 413(P) | −632 | −1230 | −2074 | −2144 | −2996 | −1453 | −2116 | −2631 | −2128 | −2928 | −2213 | −1658 | 3610 | −2006 | −2221 | −852 | 1302 | −1931 | −3185 | −2917 | 419 |
| — | −149 | −500 | 233 | 43 | −381 | 399 | 106 | −626 | 210 | −466 | −720 | 275 | 394 | 45 | 96 | 359 | 117 | −369 | −294 | −249 | |
| — | −16 | −7108 | −8150 | −894 | −1115 | −701 | −1378 | * | * | | | | | | | | | | | | |
| 414(A) | 3438 | −1472 | −2846 | −3040 | −3287 | −1726 | −2735 | −2840 | −3028 | −3257 | −2662 | −2236 | −2447 | −2798 | −2944 | −1216 | −1387 | −2183 | −3405 | −3320 | 420 |
| — | −149 | −500 | 233 | 43 | −381 | 399 | 106 | −626 | 210 | −466 | −720 | 275 | 394 | 45 | 96 | 359 | 117 | −369 | −294 | −249 | |
| — | −16 | −7108 | −8150 | −894 | −1115 | −701 | −1378 | * | * | | | | | | | | | | | | |
| 415(R) | −1454 | −2316 | −1780 | −878 | −2834 | −2232 | −428 | −2292 | 2281 | −2200 | −1473 | −940 | −2240 | −17 | 2627 | −1386 | −1270 | 588 | −2249 | −1960 | 421 |
| — | −149 | −500 | 233 | 43 | −381 | 399 | 106 | −626 | 210 | −466 | −720 | 275 | 394 | 45 | 96 | 359 | 117 | −369 | −294 | −249 | |
| — | −16 | −7108 | −8150 | −894 | −1115 | −701 | −1378 | * | * | | | | | | | | | | | | |
| 416(V) | −1771 | −1603 | −3750 | −3689 | −2037 | −3050 | −3231 | 403 | −3479 | −1154 | −1076 | −3246 | −3399 | −3383 | −3437 | −2628 | −1917 | 3536 | −3074 | −2677 | 422 |
| — | −149 | −500 | 233 | 43 | −381 | 399 | 106 | −626 | 210 | −466 | −720 | 275 | 394 | 45 | 96 | 359 | 117 | −369 | −294 | −249 | |
| — | −16 | −7108 | −8150 | −894 | −1115 | −701 | −1378 | * | * | | | | | | | | | | | | |
| 417(F) | −3342 | −2776 | −4026 | −4232 | 4354 | −3545 | −1431 | −2315 | −4038 | −1801 | −1900 | −3299 | −3780 | −3350 | −3645 | −3490 | −3420 | −2566 | −739 | 349 | 423 |
| — | −149 | −500 | 233 | 43 | −381 | 399 | 106 | −626 | 210 | −466 | −720 | 275 | 394 | 45 | 96 | 359 | 117 | −369 | −294 | −249 | |
| — | −16 | −7108 | −8150 | −894 | −1115 | −701 | −1378 | * | * | | | | | | | | | | | | |
| 418(D) | −1572 | −3426 | 2573 | 2447 | −3613 | −1583 | −879 | −3513 | −1050 | −3393 | −2684 | 1292 | −2085 | −535 | −1855 | −1253 | −1623 | −3000 | −3585 | −2609 | 424 |
| — | −149 | −500 | 233 | 43 | −381 | 399 | 106 | −626 | 210 | −466 | −720 | 275 | 394 | 45 | 96 | 359 | 117 | −369 | −294 | −249 | |
| — | −16 | −7108 | −8150 | −894 | −1115 | −701 | −1378 | * | * | | | | | | | | | | | | |
| 419(S) | −879 | −1989 | 1498 | −177 | −3045 | 1600 | −939 | −2843 | −904 | −2867 | −2046 | −438 | −1922 | −591 | −1483 | 2171 | −1044 | −2226 | −3072 | −2372 | 425 |
| — | −149 | −500 | 233 | 43 | −381 | 399 | 106 | −626 | 210 | −466 | −720 | 275 | 394 | 45 | 96 | 359 | 117 | −369 | −294 | −249 | |
| — | −16 | −7108 | −8150 | −894 | −1115 | −701 | −1378 | * | * | | | | | | | | | | | | |
| 420(E) | −2641 | −3308 | −896 | 3732 | −3966 | −2458 | −2043 | −4105 | −2128 | −4016 | −3555 | −1531 | −2959 | −1842 | −2560 | −2479 | −2750 | −3722 | −3563 | −3385 | 426 |
| — | −149 | −500 | 233 | 43 | −381 | 399 | 106 | −626 | 210 | −466 | −720 | 275 | 394 | 45 | 96 | 359 | 117 | −369 | −294 | −249 | |
| — | −16 | −7108 | −8150 | −894 | −1115 | −701 | −1378 | * | * | | | | | | | | | | | | |
| 421(Q) | −705 | −1925 | −199 | 2112 | 917 | −1534 | −288 | −1824 | 42 | −1842 | −1054 | −210 | −1709 | 2163 | −420 | −611 | −656 | −1502 | −1997 | −1291 | 427 |
| — | −149 | −500 | 233 | 43 | −381 | 399 | 106 | −626 | 210 | −466 | −720 | 275 | 394 | 45 | 96 | 359 | 117 | −369 | −294 | −249 | |
| — | −16 | −7108 | −8150 | −894 | −1115 | −701 | −1378 | * | * | | | | | | | | | | | | |
| 422(H) | −569 | −2048 | 1450 | 1526 | −2349 | −1405 | 1830 | −2103 | 181 | −2058 | −1157 | −37 | −1569 | 272 | −349 | 713 | 620 | −1662 | −2240 | −1537 | 428 |
| — | −149 | −500 | 233 | 43 | −381 | 399 | 106 | −626 | 210 | −466 | −720 | 275 | 394 | 45 | 96 | 359 | 117 | −369 | −294 | −249 | |
| — | −16 | −7108 | −8150 | −894 | −1115 | −701 | −1378 | * | * | | | | | | | | | | | | |
| 423(C) | 1626 | 2878 | −2671 | −2107 | 1264 | −1968 | −1091 | 233 | −1777 | −334 | 250 | −1672 | −2128 | −1459 | −1691 | −1096 | −529 | 1209 | −1066 | −704 | 429 |
| — | −149 | −500 | 233 | 43 | −381 | 399 | 106 | −626 | 210 | −466 | −720 | 275 | 394 | 45 | 96 | 359 | 117 | −369 | −294 | −249 | |
| — | −16 | −7108 | −8150 | −894 | −1115 | −701 | −1378 | * | * | | | | | | | | | | | | |
| 424(M) | −2042 | −1634 | −4379 | −3826 | −659 | −3976 | −2899 | 2765 | −3546 | 1204 | 3085 | −3605 | −3604 | −2896 | −3318 | −3183 | −1961 | 195 | −2135 | −2058 | 430 |
| — | −149 | −500 | 233 | 43 | −381 | 399 | 106 | −626 | 210 | −466 | −720 | 275 | 394 | 45 | 96 | 359 | 117 | −369 | −294 | −249 | |
| — | −16 | −7108 | −8150 | −894 | −1115 | −701 | −1378 | * | * | | | | | | | | | | | | |
| 425(E) | 412 | −2447 | 1356 | 2379 | −2747 | −1477 | −445 | −2527 | −243 | −2477 | −1622 | −107 | 855 | −36 | −831 | −730 | −894 | −2073 | −2668 | −1906 | 431 |
| — | −149 | −500 | 233 | 43 | −381 | 399 | 106 | −626 | 210 | −466 | −720 | 275 | 394 | 45 | 96 | 359 | 117 | −369 | −294 | −249 | |
| — | −16 | −7108 | −8150 | −894 | −1115 | −701 | −1378 | * | * | | | | | | | | | | | | |
| 426(A) | 2822 | −1031 | −2418 | −2539 | −3226 | 1898 | −2364 | −2941 | −2626 | −3229 | −2379 | −1722 | −2026 | −2302 | −2634 | −654 | −848 | −1983 | −3415 | −3226 | 432 |
| — | −149 | −500 | 233 | 43 | −381 | 399 | 106 | −626 | 210 | −466 | −720 | 275 | 394 | 45 | 96 | 359 | 117 | −369 | −294 | −249 | |
| — | −16 | −7108 | −8150 | −894 | −1115 | −701 | −1378 | * | * | | | | | | | | | | | | |
| 427(I) | −1772 | −1325 | −4307 | −3877 | −1405 | −3993 | −3383 | 2935 | −3705 | 820 | −217 | −3632 | −3761 | −3400 | −3682 | −3260 | −1742 | 2033 | −2838 | −2525 | 433 |
| — | −149 | −500 | 233 | 43 | −381 | 399 | 106 | −626 | 210 | −466 | −720 | 275 | 394 | 45 | 96 | 359 | 117 | −369 | −294 | −249 | |
| — | −16 | −7108 | −8150 | −894 | −1115 | −701 | −1378 | * | * | | | | | | | | | | | | |
| 428(L) | −875 | −1634 | −575 | 959 | −1581 | −1769 | −525 | −1179 | −135 | 1884 | −625 | −547 | −1931 | 1405 | −450 | −909 | −816 | −1074 | −1883 | −1383 | 434 |
| — | −149 | −500 | 233 | 43 | −381 | 399 | 106 | −626 | 210 | −466 | −720 | 275 | 394 | 45 | 96 | 359 | 117 | −369 | −294 | −249 | |
| — | −16 | −7108 | −8150 | −894 | −1115 | −701 | −1378 | * | * | | | | | | | | | | | | |
| 429(A) | 1705 | −1826 | −180 | 949 | −2318 | −1410 | −359 | −2041 | −53 | −2067 | −1204 | 1001 | −1652 | 52 | −561 | 1232 | −595 | −1609 | −2298 | −1643 | 435 |
| — | −149 | −500 | 233 | 43 | −381 | 399 | 106 | −626 | 210 | −466 | −720 | 275 | 394 | 45 | 96 | 359 | 117 | −369 | −294 | −249 | |
| — | −16 | −7108 | −8150 | −894 | −1115 | −701 | −1378 | * | * | | | | | | | | | | | | |
| 430(D) | −1074 | −2458 | 2381 | 60 | −2921 | 1927 | −658 | −2710 | −463 | −2675 | −1860 | −271 | −1918 | −276 | 866 | −915 | −1100 | −2245 | −2845 | −2124 | 436 |
| — | −149 | −500 | 233 | 43 | −381 | 399 | 106 | −626 | 210 | −466 | −720 | 275 | 394 | 45 | 96 | 359 | 117 | −369 | −294 | −249 | |
| — | −16 | −7108 | −8150 | −894 | −1115 | −701 | −1378 | * | * | | | | | | | | | | | | |
| 431(K) | −688 | −2117 | 785 | 888 | −2469 | −1529 | −187 | −2189 | 2380 | −2106 | −1221 | −162 | −1661 | 256 | 1134 | −553 | −619 | −1760 | −2240 | −1607 | 437 |
| — | −149 | −500 | 233 | 43 | −381 | 399 | 106 | −626 | 210 | −466 | −720 | 275 | 394 | 45 | 96 | 359 | 117 | −369 | −294 | −249 | |
| — | −16 | −7108 | −8150 | −894 | −1115 | −701 | −1378 | * | * | | | | | | | | | | | | |
| 432(I) | −2019 | −1582 | −4380 | −3941 | −1000 | −4086 | −3253 | 3295 | −3671 | 1100 | 145 | −3736 | −3783 | −3222 | −3556 | −3378 | −1976 | 657 | −2517 | −2289 | 438 |
| — | −149 | −500 | 233 | 43 | −381 | 399 | 106 | −626 | 210 | −466 | −720 | 275 | 394 | 45 | 96 | 359 | 117 | −369 | −294 | −249 | |
| — | −16 | −7108 | −8150 | −894 | −1115 | −701 | −1378 | * | * | | | | | | | | | | | | |
| 433(Q) | −490 | −1797 | −369 | 171 | −2078 | −1457 | 1762 | −1779 | 1157 | −1780 | −905 | 1165 | −1550 | 1798 | −48 | −396 | −422 | 725 | −1986 | −1366 | 439 |
| — | −149 | −500 | 233 | 43 | −381 | 399 | 106 | −626 | 210 | −466 | −720 | 275 | 394 | 45 | 96 | 359 | 117 | −369 | −294 | −249 | |
| — | −16 | −7108 | −8150 | −894 | −1115 | −701 | −1378 | * | * | | | | | | | | | | | | |
| 434(A) | 1954 | −1836 | 1733 | −180 | −2714 | −1429 | −806 | −2438 | −679 | −2518 | −1698 | −430 | 1775 | −448 | −1211 | −736 | −894 | −1923 | −2765 | −2117 | 440 |
| — | −149 | −500 | 233 | 43 | −381 | 399 | 106 | −626 | 210 | −466 | −720 | 275 | 394 | 45 | 96 | 359 | 117 | −369 | −294 | −249 | |
| — | −16 | −7108 | −8150 | −894 | −1115 | −701 | −1378 | * | * | | | | | | | | | | | | |
| 435(G) | −2594 | −2690 | −3304 | −3623 | −4328 | 3747 | −3462 | −4761 | −3953 | −4671 | −4212 | −3320 | −3352 | −3748 | −3779 | −2839 | −2981 | −4004 | −3668 | −4222 | 441 |
| — | −149 | −500 | 233 | 43 | −381 | 399 | 106 | −626 | 210 | −466 | −720 | 275 | 394 | 45 | 96 | 359 | 117 | −369 | −294 | −249 | |
| — | −16 | −7108 | −8150 | −894 | −1115 | −701 | −1378 | * | * | | | | | | | | | | | | |
| 436(D) | −1736 | −3455 | 3490 | 97 | −3737 | −1646 | −1070 | −3753 | −1363 | −3647 | −3016 | 1602 | −2204 | −760 | −2218 | −1420 | −1838 | −3213 | −3756 | −2780 | 442 |
| — | −149 | −500 | 233 | 43 | −381 | 399 | 106 | −626 | 210 | −466 | −720 | 275 | 394 | 45 | 96 | 359 | 117 | −369 | −294 | −249 | |
| — | −16 | −7108 | −8150 | −894 | −1115 | −701 | −1378 | * | * | | | | | | | | | | | | |
| 437(V) | −1721 | −1302 | −4229 | −3874 | −1705 | −3894 | −3582 | 1607 | −3706 | −582 | −513 | −3610 | −3786 | −3559 | −3767 | −3209 | −1725 | 3294 | −3158 | −2712 | 443 |
| — | −149 | −500 | 233 | 43 | −381 | 399 | 106 | −626 | 210 | −466 | −720 | 275 | 394 | 45 | 96 | 359 | 117 | −369 | −294 | −249 | |
| — | −16 | −7108 | −8150 | −894 | −1115 | −701 | −1378 | * | * | | | | | | | | | | | | |
| 438(V) | 594 | −988 | −3391 | −2911 | −1164 | −2888 | −2187 | 845 | −2637 | 765 | −154 | −2576 | −2962 | −2387 | −2622 | −2074 | −1205 | 2800 | −2084 | −1724 | 444 |
| — | −149 | −500 | 233 | 43 | −381 | 399 | 106 | −626 | 210 | −466 | −720 | 275 | 394 | 45 | 96 | 359 | 117 | −369 | −294 | −249 | |
| — | −16 | −7108 | −8150 | −894 | −1115 | −701 | −1378 | * | * | | | | | | | | | | | | |
| 439(V) | −1771 | −1603 | −3750 | −3689 | −2037 | −3050 | −3231 | 403 | −3479 | −1154 | −1076 | −3246 | −3399 | −3383 | −3437 | −2628 | −1917 | 3536 | −3074 | −2677 | 445 |
| — | −149 | −500 | 233 | 43 | −381 | 399 | 106 | −626 | 210 | −466 | −720 | 275 | 394 | 45 | 96 | 359 | 117 | −369 | −294 | −249 | |
| — | −16 | −7108 | −8150 | −894 | −1115 | −701 | −1378 | * | * | | | | | | | | | | | | |
| 440(I) | −1754 | −1308 | −4295 | −3867 | −1434 | −3978 | −3377 | 2661 | −3697 | 862 | −247 | −3617 | −3754 | −3406 | −3679 | −3243 | −1725 | 2373 | −2852 | −2526 | 446 |
| — | −149 | −500 | 233 | 43 | −381 | 399 | 106 | −626 | 210 | −466 | −720 | 275 | 394 | 45 | 96 | 359 | 117 | −369 | −294 | −249 | |
| — | −16 | −7108 | −8150 | −894 | −1115 | −701 | −1378 | * | * | | | | | | | | | | | | |
| 441(R) | −2957 | −3022 | −3318 | −2735 | −3796 | −2998 | −1968 | −3912 | −846 | −3631 | −3157 | −2611 | −3280 | −1724 | 4056 | −3026 | −2913 | −3650 | −3096 | −3185 | 447 |
| — | −149 | −500 | 233 | 43 | −381 | 399 | 106 | −626 | 210 | −466 | −720 | 275 | 394 | 45 | 96 | 359 | 117 | −369 | −294 | −249 | |
| — | −16 | −7108 | −8150 | −894 | −1115 | −701 | −1378 | * | * | | | | | | | | | | | | |
| 442(Y) | −1321 | −1438 | −1994 | −1608 | 2186 | 527 | −450 | −1117 | −1481 | −1211 | −693 | 1178 | −2522 | −1217 | −1665 | −1518 | −1275 | −1021 | −198 | 3178 | 448 |
| — | −149 | −500 | 233 | 43 | −381 | 399 | 106 | −626 | 210 | −466 | −720 | 275 | 394 | 45 | 96 | 359 | 117 | −369 | −294 | −249 | |
| — | −16 | −7108 | −8150 | −894 | −1115 | −701 | −1378 | * | * | | | | | | | | | | | | |
| 443(C) | −675 | 2205 | −2544 | 972 | −572 | −2236 | −1121 | 1373 | −1671 | 679 | 261 | −1700 | −2270 | −1403 | −1668 | −1311 | −621 | 1601 | −1150 | −790 | 449 |
| — | −149 | −500 | 233 | 43 | −381 | 399 | 106 | −626 | 210 | −466 | −720 | 275 | 394 | 45 | 96 | 359 | 117 | −369 | −294 | −249 | |
| — | −16 | −7108 | −8150 | −894 | −1115 | −701 | −1378 | * | * | | | | | | | | | | | | |
| 444(G) | −2594 | −2690 | −3304 | −3623 | −4328 | 3747 | −3462 | −4761 | −3953 | −4671 | −4212 | −3320 | −3352 | −3748 | −3779 | −2839 | −2981 | −4004 | −3668 | −4222 | 450 |
| — | −149 | −500 | 233 | 43 | −381 | 399 | 106 | −626 | 210 | −466 | −720 | 275 | 394 | 45 | 96 | 359 | 117 | −369 | −294 | −249 | |
| — | −16 | −7108 | −8150 | −894 | −1115 | −701 | −1378 | * | * | | | | | | | | | | | | |
| 445(P) | −2931 | −2878 | −3420 | −3706 | −4181 | −2925 | −3468 | −4621 | −3859 | −4490 | −4165 | −3491 | 4225 | −3781 | −3695 | −3182 | −3279 | −4087 | −3594 | −4064 | 451 |
| — | −149 | −500 | 233 | 43 | −381 | 399 | 106 | −626 | 210 | −466 | −720 | 275 | 394 | 45 | 96 | 359 | 117 | −369 | −294 | −249 | |
| — | −16 | −7108 | −8150 | −894 | −1115 | −701 | −1378 | * | * | | | | | | | | | | | | |
| 446(K) | −1060 | −2058 | −1088 | −460 | −2432 | −1917 | −357 | −1970 | 2801 | −1978 | −1220 | −632 | −1990 | 1339 | 367 | −999 | −946 | 536 | −2145 | −1717 | 452 |
| — | −149 | −500 | 233 | 43 | −381 | 399 | 106 | −626 | 210 | −466 | −720 | 275 | 394 | 45 | 96 | 359 | 117 | −369 | −294 | −249 | |
| — | −16 | −7108 | −8150 | −894 | −1115 | −701 | −1378 | * | * | | | | | | | | | | | | |
| 447(G) | −2594 | −2690 | −3304 | −3623 | −4328 | 3747 | −3462 | −4761 | −3953 | −4671 | −4212 | −3320 | −3352 | −3748 | −3779 | −2839 | −2981 | −4004 | −3668 | −4222 | 453 |
| — | −149 | −500 | 233 | 43 | −381 | 399 | 106 | −626 | 210 | −466 | −720 | 275 | 394 | 45 | 96 | 359 | 117 | −369 | −294 | −249 | |
| — | −16 | −7108 | −8150 | −894 | −1115 | −701 | −1378 | * | * | | | | | | | | | | | | |
| 448(G) | −2594 | −2690 | −3304 | −3623 | −4328 | 3747 | −3462 | −4761 | −3953 | −4671 | −4212 | −3320 | −3352 | −3748 | −3779 | −2839 | −2981 | −4004 | −3668 | −4222 | 454 |
| — | −149 | −500 | 233 | 43 | −381 | 399 | 106 | −626 | 210 | −466 | −720 | 275 | 394 | 45 | 96 | 359 | 117 | −369 | −294 | −249 | |
| — | −16 | −7108 | −8150 | −894 | −1115 | −701 | −1378 | * | * | | | | | | | | | | | | |
| 449(P) | −2931 | −2878 | −3420 | −3706 | −4181 | −2925 | −3468 | −4621 | −3859 | −4490 | −4165 | −3491 | 4225 | −3781 | −3695 | −3182 | −3279 | −4087 | −3594 | −4064 | 455 |
| — | −149 | −500 | 233 | 43 | −381 | 399 | 106 | −626 | 210 | −466 | −720 | 275 | 394 | 45 | 96 | 359 | 117 | −369 | −294 | −249 | |
| — | −16 | −7108 | −8150 | −894 | −1115 | −701 | −1378 | * | * | | | | | | | | | | | | |
| 450(G) | −2594 | −2690 | −3304 | −3623 | −4328 | 3747 | −3462 | −4761 | −3953 | −4671 | −4212 | −3320 | −3352 | −3748 | −3779 | −2839 | −2981 | −4004 | −3668 | −4222 | 456 |
| — | −149 | −500 | 233 | 43 | −381 | 399 | 106 | −626 | 210 | −466 | −720 | 275 | 394 | 45 | 96 | 359 | 117 | −369 | −294 | −249 | |
| — | −16 | −7108 | −8150 | −894 | −1115 | −701 | −1378 | * | * | | | | | | | | | | | | |
| 451(M) | −2406 | −2296 | −3638 | −3594 | −1525 | −3105 | −2824 | −1047 | −3121 | −596 | 5043 | −3293 | −3425 | −3046 | −2996 | −2911 | −2552 | −1398 | −2513 | −2207 | 457 |
| — | −149 | −500 | 233 | 43 | −381 | 399 | 106 | −626 | 210 | −466 | −720 | 275 | 394 | 45 | 96 | 359 | 117 | −369 | −294 | −249 | |
| — | −16 | −7108 | −8150 | −894 | −1115 | −701 | −1378 | * | * | | | | | | | | | | | | |
| 452(P) | −1659 | −2241 | −2022 | −1646 | −3185 | −2242 | −1373 | −3000 | −450 | −2936 | −2274 | −1624 | 3435 | −1065 | 2095 | −1730 | −1750 | −2593 | −2816 | −2613 | 458 |
| — | −149 | −500 | 233 | 43 | −381 | 399 | 106 | −626 | 210 | −466 | −720 | 275 | 394 | 45 | 96 | 359 | 117 | −369 | −294 | −249 | |
| — | −16 | −7108 | −8150 | −894 | −1115 | −701 | −1378 | * | * | | | | | | | | | | | | |
| 453(E) | −2641 | −3308 | −896 | 3732 | −3966 | −2458 | −2043 | −4105 | −2128 | −4016 | −3555 | −1531 | −2959 | −1842 | −2560 | −2479 | −2750 | −3722 | −3563 | −3385 | 459 |
| — | −149 | −500 | 233 | 43 | −381 | 399 | 106 | −626 | 210 | −466 | −720 | 275 | 394 | 45 | 96 | 359 | 117 | −369 | −294 | −249 | |
| — | −16 | −7108 | −8150 | −894 | −1115 | −701 | −1378 | * | * | | | | | | | | | | | | |
| 454(M) | −2406 | −2296 | −3638 | −3594 | −1525 | −3105 | −2824 | −1047 | −3121 | −596 | 5043 | −3293 | −3425 | −3046 | −2996 | −2911 | −2552 | −1398 | −2513 | −2207 | 460 |
| — | −149 | −500 | 233 | 43 | −381 | 399 | 106 | −626 | 210 | −466 | −720 | 275 | 394 | 45 | 96 | 359 | 117 | −369 | −294 | −249 | |
| — | −16 | −7108 | −8150 | −894 | −1115 | −701 | −1378 | * | * | | | | | | | | | | | | |
| 455(L) | −2871 | −2457 | −4231 | −4103 | −1033 | −3803 | −3165 | −541 | −3734 | 3130 | −31 | −3965 | −3797 | −3286 | −3484 | −3713 | −2869 | −1136 | −2394 | −2220 | 461 |
| — | −149 | −500 | 233 | 43 | −381 | 399 | 106 | −626 | 210 | −466 | −720 | 275 | 394 | 45 | 96 | 359 | 117 | −369 | −294 | −249 | |
| — | −16 | −7108 | −8150 | −894 | −1115 | −701 | −1378 | * | * | | | | | | | | | | | | |
| 456(K) | 1368 | −1491 | −763 | −332 | −2319 | −1417 | −551 | −1998 | 1786 | −2068 | −1221 | −500 | −1721 | −160 | −470 | 1631 | −587 | −1532 | −2299 | −1754 | 462 |
| — | −149 | −500 | 233 | 43 | −381 | 399 | 106 | −626 | 210 | −466 | −720 | 275 | 394 | 45 | 96 | 359 | 117 | −369 | −294 | −249 | |
| — | −16 | −7108 | −8150 | −894 | −1115 | −701 | −1378 | * | * | | | | | | | | | | | | |
| 457(P) | −1500 | −1738 | −2514 | −2380 | −1555 | −2358 | −2022 | −1126 | −2063 | 1224 | −841 | −2189 | 3436 | −2061 | −2129 | −1822 | −1674 | −1231 | −2290 | −1878 | 463 |
| — | −149 | −500 | 233 | 43 | −381 | 399 | 106 | −626 | 210 | −466 | −720 | 275 | 394 | 45 | 96 | 359 | 117 | −369 | −294 | −249 | |
| — | −16 | −7108 | −8150 | −894 | −1115 | −701 | −1378 | * | * | | | | | | | | | | | | |
| 458(T) | −351 | −974 | −2208 | −2185 | −2894 | −1237 | −2041 | −2561 | −2125 | −2863 | −2046 | −1539 | −1948 | −1923 | −2218 | 1543 | 3230 | −1758 | −3139 | −2834 | 464 |
| — | −149 | −500 | 233 | 43 | −381 | 399 | 106 | −626 | 210 | −466 | −720 | 275 | 394 | 45 | 96 | 359 | 117 | −369 | −294 | −249 | |
| — | −16 | −7108 | −8150 | −894 | −1115 | −701 | −1378 | * | * | | | | | | | | | | | | |
| 459(S) | −897 | −1462 | −2333 | −2543 | −3185 | −1640 | −2474 | −3294 | −2686 | −3497 | −2780 | −1973 | −2360 | −2483 | −2703 | 3465 | −1316 | −2413 | −3310 | −3025 | 465 |
| — | −149 | −500 | 233 | 43 | −381 | 399 | 106 | −626 | 210 | −466 | −720 | 275 | 394 | 45 | 96 | 359 | 117 | −369 | −294 | −249 | |
| — | −16 | −7108 | −8150 | −894 | −1115 | −701 | −1378 | * | * | | | | | | | | | | | | |
| 460(M) | 2706 | −986 | −2433 | −2144 | −1502 | −1684 | −1706 | −700 | −1858 | −968 | 2744 | −1705 | −2188 | −1713 | −1932 | −963 | −862 | −592 | −2145 | −1794 | 466 |
| — | −149 | −500 | 233 | 43 | −381 | 399 | 106 | −626 | 210 | −466 | −720 | 275 | 394 | 45 | 96 | 359 | 117 | −369 | −294 | −249 | |
| — | −16 | −7108 | −8150 | −894 | −1115 | −701 | −1378 | * | * | | | | | | | | | | | | |
| 461(I) | −2103 | −1659 | −4461 | −3992 | −869 | −4152 | −3233 | 3082 | −3723 | 1619 | 290 | −3801 | −3788 | −3171 | −3557 | −3432 | −2046 | 487 | −2418 | −2265 | 467 |
| — | −149 | −500 | 233 | 43 | −381 | 399 | 106 | −626 | 210 | −466 | −720 | 275 | 394 | 45 | 96 | 359 | 117 | −369 | −294 | −249 | |
| — | −16 | −7108 | −8150 | −894 | −1115 | −701 | −1378 | * | * | | | | | | | | | | | | |
| 462(I) | −1761 | −1312 | −4317 | −3954 | −1713 | −4027 | −3703 | 3225 | −3814 | −556 | −498 | −3712 | −3859 | −3653 | −3877 | −3344 | −1754 | 2110 | −3216 | −2787 | 468 |
| — | −149 | −500 | 233 | 43 | −381 | 399 | 106 | −626 | 210 | −466 | −720 | 275 | 394 | 45 | 96 | 359 | 117 | −369 | −294 | −249 | |
| — | −16 | −7108 | −8150 | −894 | −1115 | −701 | −1378 | * | * | | | | | | | | | | | | |
| 463(G) | −2594 | −2690 | −3304 | −3623 | −4328 | 3747 | −3462 | −4761 | −3953 | −4671 | −4212 | −3320 | −3352 | −3748 | −3779 | −2839 | −2981 | −4004 | −3668 | −4222 | 469 |
| — | −149 | −500 | 233 | 43 | −381 | 399 | 106 | −626 | 210 | −466 | −720 | 275 | 394 | 45 | 96 | 359 | 117 | −369 | −294 | −249 | |
| — | −16 | −7108 | −8150 | −894 | −1115 | −701 | −1378 | * | * | | | | | | | | | | | | |
| 464(K) | 1641 | −2033 | −323 | 914 | −2415 | −1565 | −296 | −2097 | 2052 | −2080 | −1233 | −257 | −1736 | 125 | −133 | −646 | −702 | −1707 | −2258 | −1657 | 470 |
| — | −149 | −500 | 233 | 43 | −381 | 399 | 106 | −626 | 210 | −466 | −720 | 275 | 394 | 45 | 96 | 359 | 117 | −369 | −294 | −249 | |
| — | −16 | −7108 | −8150 | −894 | −1115 | −701 | −1378 | * | * | | | | | | | | | | | | |
| 465(G) | −2594 | −2690 | −3304 | −3623 | −4328 | 3747 | −3462 | −4761 | −3953 | −4671 | −4212 | −3320 | −3352 | −3748 | −3779 | −2839 | −2981 | −4004 | −3668 | −4222 | 471 |
| — | −149 | −500 | 233 | 43 | −381 | 399 | 106 | −626 | 210 | −466 | −720 | 275 | 394 | 45 | 96 | 359 | 117 | −369 | −294 | −249 | |
| — | −16 | −7108 | −8150 | −894 | −1115 | −701 | −1378 | * | * | | | | | | | | | | | | |
| 466(L) | −1699 | −1807 | −2268 | −1925 | −830 | −2795 | −1551 | −455 | −1225 | 2510 | 90 | −1958 | −2845 | 1927 | −1308 | −2067 | −1651 | −846 | −1841 | −1454 | 472 |
| — | −149 | −500 | 233 | 43 | −381 | 399 | 106 | −626 | 210 | −466 | −720 | 275 | 394 | 45 | 96 | 359 | 117 | −369 | −294 | −249 | |
| — | −16 | −7108 | −8150 | −894 | −1115 | −701 | −1378 | * | * | | | | | | | | | | | | |
| 467(G) | −2594 | −2690 | −3304 | −3623 | −4328 | 3747 | −3462 | −4761 | −3953 | −4671 | −4212 | −3320 | −3352 | −3748 | −3779 | −2839 | −2981 | −4004 | −3668 | −4222 | 473 |
| — | −149 | −500 | 233 | 43 | −381 | 399 | 106 | −626 | 210 | −466 | −720 | 275 | 394 | 45 | 96 | 359 | 117 | −369 | −294 | −249 | |
| — | −16 | −7108 | −8150 | −894 | −1115 | −701 | −1378 | * | * | | | | | | | | | | | | |
| 468(D) | −853 | −2415 | 2115 | 1717 | −2702 | −1468 | −378 | −2484 | 1085 | −2417 | −1546 | −84 | −1732 | 41 | −699 | 696 | −824 | −2025 | −2594 | −1839 | 474 |
| — | −149 | −500 | 233 | 43 | −381 | 399 | 106 | −626 | 210 | −466 | −720 | 275 | 394 | 45 | 96 | 359 | 117 | −369 | −294 | −249 | |
| — | −16 | −7108 | −8150 | −894 | −1115 | −701 | −1378 | * | * | | | | | | | | | | | | |
| 469(S) | −892 | −1780 | −931 | −688 | −2757 | −1643 | −830 | −2472 | 1671 | −2492 | −1708 | −799 | −2018 | −468 | −365 | 2676 | −1004 | −1981 | −2598 | −2130 | 475 |
| — | −149 | −500 | 233 | 43 | −381 | 399 | 106 | −626 | 210 | −466 | −720 | 275 | 394 | 45 | 96 | 359 | 117 | −369 | −294 | −249 | |
| — | −16 | −7108 | −8150 | −894 | −1115 | −701 | −1378 | * | * | | | | | | | | | | | | |
| 470(C) | −1135 | 3503 | −3700 | −3406 | −1670 | −2549 | −2675 | 653 | −3101 | −916 | −667 | −2727 | −2925 | −2870 | −3030 | −1868 | −1288 | 2927 | −2619 | −2222 | 476 |
| — | −149 | −500 | 233 | 43 | −381 | 399 | 106 | −626 | 210 | −466 | −720 | 275 | 394 | 45 | 96 | 359 | 117 | −369 | −294 | −249 | |
| — | −16 | −7108 | −8150 | −894 | −1115 | −701 | −1378 | * | * | | | | | | | | | | | | |
| 471(A) | 2590 | −1035 | −2404 | −2530 | −3236 | 2290 | −2365 | −2954 | −2627 | −3240 | −2389 | −1719 | −2027 | −2302 | −2637 | −656 | −851 | −1991 | −3423 | −3234 | 477 |
| — | −149 | −500 | 233 | 43 | −381 | 399 | 106 | −626 | 210 | −466 | −720 | 275 | 394 | 45 | 96 | 359 | 117 | −369 | −294 | −249 | |
| — | −16 | −7108 | −8150 | −894 | −1115 | −701 | −1378 | * | * | | | | | | | | | | | | |
| 472(L) | −2632 | −2152 | −4630 | −4185 | 1767 | −4324 | −2442 | −61 | −3879 | 2789 | 563 | −3833 | −3823 | −2970 | −3513 | −3609 | −2518 | −738 | −1527 | −945 | 478 |
| — | −149 | −500 | 233 | 43 | −381 | 399 | 106 | −626 | 210 | −466 | −720 | 275 | 394 | 45 | 96 | 359 | 117 | −369 | −294 | −249 | |
| — | −16 | −7108 | −8150 | −894 | −1115 | −701 | −1378 | * | * | | | | | | | | | | | | |
| 473(I) | −2073 | −1632 | −4434 | −3975 | −911 | −4130 | −3238 | 3164 | −3706 | 1451 | 244 | −3779 | −3785 | −3187 | −3557 | −3413 | −2021 | 546 | −2449 | −2273 | 479 |
| — | −149 | −500 | 233 | 43 | −381 | 399 | 106 | −626 | 210 | −466 | −720 | 275 | 394 | 45 | 96 | 359 | 117 | −369 | −294 | −249 | |
| — | −16 | −7108 | −8150 | −894 | −1115 | −701 | −1378 | * | * | | | | | | | | | | | | |
| 474(T) | −1213 | −1674 | −2755 | −2906 | −3163 | −1922 | −2659 | −2698 | −2788 | −3105 | −2612 | −2311 | −2600 | −2708 | −2753 | −1463 | 3819 | −2197 | −3286 | −3156 | 480 |
| — | −149 | −500 | 233 | 43 | −381 | 399 | 106 | −626 | 210 | −466 | −720 | 275 | 394 | 45 | 96 | 359 | 117 | −369 | −294 | −249 | |
| — | −16 | −7108 | −8150 | −894 | −1115 | −701 | −1378 | * | * | | | | | | | | | | | | |
| 475(D) | −2784 | −3432 | 4016 | −1200 | −4140 | −2466 | −2197 | −4505 | −2621 | −4365 | −3956 | −1551 | −3014 | −2039 | −3232 | −2593 | −2938 | −4046 | −3710 | −3552 | 481 |
| — | −149 | −500 | 233 | 43 | −381 | 399 | 106 | −626 | 210 | −466 | −720 | 275 | 394 | 45 | 96 | 359 | 117 | −369 | −294 | −249 | |
| — | −16 | −7108 | −8150 | −894 | −1115 | −701 | −1378 | * | * | | | | | | | | | | | | |
| 476(G) | −2594 | −2690 | −3304 | −3623 | −4328 | 3747 | −3462 | −4761 | −3953 | −4671 | −4212 | −3320 | −3352 | −3748 | −3779 | −2839 | −2981 | −4004 | −3668 | −4222 | 482 |
| — | −149 | −500 | 233 | 43 | −381 | 399 | 106 | −626 | 210 | −466 | −720 | 275 | 394 | 45 | 96 | 359 | 117 | −369 | −294 | −249 | |
| — | −16 | −7108 | −8150 | −894 | −1115 | −701 | −1378 | * | * | | | | | | | | | | | | |
| 477(R) | −2957 | −3022 | −3318 | −2735 | −3796 | −2998 | −1968 | −3912 | −846 | −3631 | −3157 | −2611 | −3280 | −1724 | 4056 | −3026 | −2913 | −3650 | −3096 | −3185 | 483 |
| — | −149 | −500 | 233 | 43 | −381 | 399 | 106 | −626 | 210 | −466 | −720 | 275 | 394 | 45 | 96 | 359 | 117 | −369 | −294 | −249 | |
| — | −16 | −7108 | −8150 | −894 | −1115 | −701 | −1378 | * | * | | | | | | | | | | | | |
| 478(F) | −3342 | −2776 | −4026 | −4232 | 4354 | −3545 | −1431 | −2315 | −4038 | −1801 | −1900 | −3299 | −3780 | −3350 | −3645 | −3490 | −3420 | −2566 | −739 | 349 | 484 |
| — | −149 | −500 | 233 | 43 | −381 | 399 | 106 | −626 | 210 | −466 | −720 | 275 | 394 | 45 | 96 | 359 | 117 | −369 | −294 | −249 | |
| — | −16 | −7108 | −8150 | −894 | −1115 | −701 | −1378 | * | * | | | | | | | | | | | | |
| 479(S) | −897 | −1462 | −2333 | −2543 | −3185 | −1640 | −2474 | −3294 | −2686 | −3497 | −2780 | −1973 | −2360 | −2483 | −2703 | 3465 | −1316 | −2413 | −3310 | −3025 | 485 |
| — | −149 | −500 | 233 | 43 | −381 | 399 | 106 | −626 | 210 | −466 | −720 | 275 | 394 | 45 | 96 | 359 | 117 | −369 | −294 | −249 | |
| — | −16 | −7108 | −8150 | −894 | −1115 | −701 | −1378 | * | * | | | | | | | | | | | | |
| 480(G) | −2594 | −2690 | −3304 | −3623 | −4328 | 3747 | −3462 | −4761 | −3953 | −4671 | −4212 | −3320 | −3352 | −3748 | −3779 | −2839 | −2981 | −4004 | −3668 | −4222 | 486 |
| — | −149 | −500 | 233 | 43 | −381 | 399 | 106 | −626 | 210 | −466 | −720 | 275 | 394 | 45 | 96 | 359 | 117 | −369 | −294 | −249 | |
| — | −16 | −7108 | −8150 | −894 | −1115 | −701 | −1378 | * | * | | | | | | | | | | | | |
| 481(G) | −2594 | −2690 | −3304 | −3623 | −4328 | 3747 | −3462 | −4761 | −3953 | −4671 | −4212 | −3320 | −3352 | −3748 | −3779 | −2839 | −2981 | −4004 | −3668 | −4222 | 487 |
| — | −149 | −500 | 233 | 43 | −381 | 399 | 106 | −626 | 210 | −466 | −720 | 275 | 394 | 45 | 96 | 359 | 117 | −369 | −294 | −249 | |
| — | −16 | −7108 | −8150 | −894 | −1115 | −701 | −1378 | * | * | | | | | | | | | | | | |
| 482(T) | −359 | −976 | −2225 | −2229 | −2900 | −1242 | −2074 | −2560 | −2170 | −2875 | −2064 | −1561 | −1958 | −1969 | −2247 | 1110 | 3375 | −1760 | −3152 | −2850 | 488 |
| — | −149 | −500 | 233 | 43 | −381 | 399 | 106 | −626 | 210 | −466 | −720 | 275 | 394 | 45 | 96 | 359 | 117 | −369 | −294 | −249 | |
| — | −16 | −7108 | −8150 | −894 | −1115 | −701 | −1378 | * | * | | | | | | | | | | | | |
| 483(Y) | −3402 | −2632 | −3941 | −4011 | 1064 | −3924 | 3388 | −2526 | −3541 | −1996 | −1973 | −2625 | −3821 | −2664 | −3170 | −3135 | −3280 | −2619 | 3420 | 3756 | 489 |
| — | −149 | −500 | 233 | 43 | −381 | 399 | 106 | −626 | 210 | −466 | −720 | 275 | 394 | 45 | 96 | 359 | 117 | −369 | −294 | −249 | |
| — | −16 | −7108 | −8150 | −894 | −1115 | −701 | −1378 | * | * | | | | | | | | | | | | |
| 484(G) | −2594 | −2690 | −3304 | −3623 | −4328 | 3747 | −3462 | −4761 | −3953 | −4671 | −4212 | −3320 | −3352 | −3748 | −3779 | −2839 | −2981 | −4004 | −3668 | −4222 | 490 |
| — | −149 | −500 | 233 | 43 | −381 | 399 | 106 | −626 | 210 | −466 | −720 | 275 | 394 | 45 | 96 | 359 | 117 | −369 | −294 | −249 | |
| — | −16 | −7108 | −8150 | −894 | −1115 | −701 | −1378 | * | * | | | | | | | | | | | | |
| 485(M) | −2322 | −1904 | −4536 | −3951 | 2387 | −4112 | −2676 | 67 | −3649 | 2034 | 3156 | −3710 | −3633 | −2803 | −3311 | −3309 | −2204 | −588 | −1794 | −1586 | 491 |
| — | −149 | −500 | 233 | 43 | −381 | 399 | 106 | −626 | 210 | −466 | −720 | 275 | 394 | 45 | 96 | 359 | 117 | −369 | −294 | −249 | |
| — | −16 | −7108 | −8150 | −894 | −1115 | −701 | −1378 | * | * | | | | | | | | | | | | |
| 486(V) | −1771 | −1603 | −3750 | −3689 | −2037 | −3050 | −3231 | 403 | −3479 | −1154 | −1076 | −3246 | −3399 | −3383 | −3437 | −2628 | −1917 | 3536 | −3074 | −2677 | 492 |
| — | −149 | −500 | 233 | 43 | −381 | 399 | 106 | −626 | 210 | −466 | −720 | 275 | 394 | 45 | 96 | 359 | 117 | −369 | −294 | −249 | |
| — | −16 | −7108 | −8150 | −894 | −1115 | −701 | −1378 | * | * | | | | | | | | | | | | |
| 487(V) | −1771 | −1603 | −3750 | −3689 | −2037 | −3050 | −3231 | 403 | −3479 | −1154 | −1076 | −3246 | −3399 | −3383 | −3437 | −2628 | −1917 | 3536 | −3074 | −2677 | 493 |
| — | −149 | −500 | 233 | 43 | −381 | 399 | 106 | −626 | 210 | −466 | −720 | 275 | 394 | 45 | 96 | 359 | 117 | −369 | −294 | −249 | |
| — | −16 | −7108 | −8150 | −894 | −1115 | −701 | −1378 | * | * | | | | | | | | | | | | |
| 488(G) | −2594 | −2690 | −3304 | −3623 | −4328 | 3747 | −3462 | −4761 | −3953 | −4671 | −4212 | −3320 | −3352 | −3748 | −3779 | −2839 | −2981 | −4004 | −3668 | −4222 | 494 |
| — | −149 | −500 | 233 | 43 | −381 | 399 | 106 | −626 | 210 | −466 | −720 | 275 | 394 | 45 | 96 | 359 | 117 | −369 | −294 | −249 | |
| — | −16 | −7108 | −8150 | −894 | −1115 | −701 | −1378 | * | * | | | | | | | | | | | | |
| 489(H) | −3205 | −3079 | −2723 | −2890 | −2110 | −3046 | 5295 | −4135 | −2617 | −3813 | −3561 | −2886 | −3482 | −2833 | −2620 | −3291 | −3356 | −3895 | −2397 | −1681 | 495 |
| — | −149 | −500 | 233 | 43 | −381 | 399 | 106 | −626 | 210 | −466 | −720 | 275 | 394 | 45 | 96 | 359 | 117 | −369 | −294 | −249 | |
| — | −16 | −7108 | −8150 | −894 | −1115 | −701 | −1378 | * | * | | | | | | | | | | | | |
| 490(V) | −1754 | −1297 | −4329 | −3968 | −1770 | −4053 | −3752 | 2604 | −3840 | −621 | −545 | −3728 | −3878 | −3699 | −3917 | −3370 | −1746 | 2859 | −3276 | −2829 | 496 |
| — | −149 | −500 | 233 | 43 | −381 | 399 | 106 | −626 | 210 | −466 | −720 | 275 | 394 | 45 | 96 | 359 | 117 | −369 | −294 | −249 | |
| — | −16 | −7108 | −8150 | −894 | −1115 | −701 | −1378 | * | * | | | | | | | | | | | | |
| 491(A) | 2587 | −828 | −2477 | −2155 | −1837 | −1468 | −1728 | −743 | −1941 | −1564 | −954 | −1607 | −2033 | −1725 | −2034 | −738 | 1178 | 1108 | −2310 | −1972 | 497 |
| — | −149 | −500 | 233 | 43 | −381 | 399 | 106 | −626 | 210 | −466 | −720 | 275 | 394 | 45 | 96 | 359 | 117 | −369 | −294 | −249 | |
| — | −16 | −7108 | −8150 | −894 | −1115 | −701 | −1378 | * | * | | | | | | | | | | | | |
| 492(P) | −2931 | −2878 | −3420 | −3706 | −4181 | −2925 | −3468 | −4621 | −3859 | −4490 | −4165 | −3491 | 4225 | −3781 | −3695 | −3182 | −3279 | −4087 | −3594 | −4064 | 498 |
| — | −149 | −500 | 233 | 43 | −381 | 399 | 106 | −626 | 210 | −466 | −720 | 275 | 394 | 45 | 96 | 359 | 117 | −369 | −294 | −249 | |
| — | −16 | −7108 | −8150 | −894 | −1115 | −701 | −1378 | * | * | | | | | | | | | | | | |
| 493(E) | −2641 | −3308 | −896 | 3732 | −3966 | −2458 | −2043 | −4105 | −2128 | −4016 | −3555 | −1531 | −2959 | −1842 | −2560 | −2479 | −2750 | −3722 | −3563 | −3385 | 499 |
| — | −149 | −500 | 233 | 43 | −381 | 399 | 106 | −626 | 210 | −466 | −720 | 275 | 394 | 45 | 96 | 359 | 117 | −369 | −294 | −249 | |
| — | −16 | −7108 | −8150 | −894 | −1115 | −701 | −1378 | * | * | | | | | | | | | | | | |
| 494(A) | 3438 | −1472 | −2846 | −3040 | −3287 | −1726 | −2735 | −2840 | −3028 | −3257 | −2662 | −2236 | −2447 | −2798 | −2944 | −1216 | −1387 | −2183 | −3405 | −3320 | 500 |
| — | −149 | −500 | 233 | 43 | −381 | 399 | 106 | −626 | 210 | −466 | −720 | 275 | 394 | 45 | 96 | 359 | 117 | −369 | −294 | −249 | |
| — | −16 | −7108 | −8150 | −894 | −1115 | −701 | −1378 | * | * | | | | | | | | | | | | |
| 495(Y) | −866 | −976 | −1863 | −1331 | 1353 | −2145 | 1318 | −556 | −1116 | −777 | −173 | −1242 | −2197 | 1714 | −1301 | −1173 | −802 | 888 | −445 | 2749 | 501 |
| — | −149 | −500 | 233 | 43 | −381 | 399 | 106 | −626 | 210 | −466 | −720 | 275 | 394 | 45 | 96 | 359 | 117 | −369 | −294 | −249 | |
| — | −16 | −7108 | −8150 | −894 | −1115 | −701 | −1378 | * | * | | | | | | | | | | | | |
| 496(D) | 417 | −1831 | 1647 | 1094 | −2065 | −1488 | −353 | −1618 | −107 | −1820 | −1019 | −189 | −1698 | 30 | −623 | −603 | −643 | 1629 | −2154 | −1520 | 502 |
| — | −149 | −500 | 233 | 43 | −381 | 399 | 106 | −626 | 210 | −466 | −720 | 275 | 394 | 45 | 96 | 359 | 117 | −369 | −294 | −249 | |
| — | −16 | −7108 | −8150 | −894 | −1115 | −701 | −1378 | * | * | | | | | | | | | | | | |
| 497(G) | −2594 | −2690 | −3304 | −3623 | −4328 | 3747 | −3462 | −4761 | −3953 | −4671 | −4212 | −3320 | −3352 | −3748 | −3779 | −2839 | −2981 | −4004 | −3668 | −4222 | 503 |
| — | −149 | −500 | 233 | 43 | −381 | 399 | 106 | −626 | 210 | −466 | −720 | 275 | 394 | 45 | 96 | 359 | 117 | −369 | −294 | −249 | |
| — | −16 | −7108 | −8150 | −894 | −1115 | −701 | −1378 | * | * | | | | | | | | | | | | |
| 498(G) | −2594 | −2690 | −3304 | −3623 | −4328 | 3747 | −3462 | −4761 | −3953 | −4671 | −4212 | −3320 | −3352 | −3748 | −3779 | −2839 | −2981 | −4004 | −3668 | −4222 | 504 |
| — | −149 | −500 | 233 | 43 | −381 | 399 | 106 | −626 | 210 | −466 | −720 | 275 | 394 | 45 | 96 | 359 | 117 | −369 | −294 | −249 | |
| — | −16 | −7108 | −8150 | −894 | −1115 | −701 | −1378 | * | * | | | | | | | | | | | | |
| 499(T) | 492 | −1190 | −706 | −181 | −1475 | 311 | −333 | −1099 | −81 | 71 | −509 | 570 | 1113 | −6 | −509 | −450 | 1123 | −835 | −1680 | −1161 | 505 |
| — | −149 | −500 | 233 | 43 | −381 | 399 | 106 | −626 | 210 | −466 | −720 | 275 | 394 | 45 | 96 | 359 | 117 | −369 | −294 | −249 | |
| — | −16 | −7108 | −8150 | −894 | −1115 | −701 | −1378 | * | * | | | | | | | | | | | | |
| 500(I) | −2091 | −1746 | −3971 | −3840 | −1676 | −3532 | −3289 | 3684 | −3581 | −659 | −693 | −3562 | −3674 | −3445 | −3521 | −3194 | −2146 | 449 | −2877 | −2493 | 506 |
| — | −149 | −500 | 233 | 43 | −381 | 399 | 106 | −626 | 210 | −466 | −720 | 275 | 394 | 45 | 96 | 359 | 117 | −369 | −294 | −249 | |
| — | −16 | −7108 | −8150 | −894 | −1115 | −701 | −1378 | * | * | | | | | | | | | | | | |
| 501(A) | 3103 | −1036 | −2445 | −2572 | −3222 | 1051 | −2380 | −2930 | −2650 | −3226 | −2381 | −1739 | −2034 | −2327 | −2648 | −664 | −857 | −1981 | −3412 | −3228 | 507 |
| — | −149 | −500 | 233 | 43 | −381 | 399 | 106 | −626 | 210 | −466 | −720 | 275 | 394 | 45 | 96 | 359 | 117 | −369 | −294 | −249 | |
| — | −16 | −7108 | −8150 | −894 | −1115 | −701 | −1378 | * | * | | | | | | | | | | | | |
| 502(L) | −2239 | −1892 | −3711 | −3400 | 301 | −3520 | −1210 | −542 | −2948 | 2564 | −35 | −2786 | −3395 | −2438 | −2750 | −2747 | −2165 | −945 | −573 | 2562 | 508 |
| — | −149 | −500 | 233 | 43 | −381 | 399 | 106 | −626 | 210 | −466 | −720 | 275 | 394 | 45 | 96 | 359 | 117 | −369 | −294 | −249 | |
| — | −16 | −7108 | −8150 | −894 | −1115 | −701 | −1378 | * | * | | | | | | | | | | | | |
| 503(V) | −1757 | −1387 | −4101 | −3681 | −1174 | −3714 | −3031 | 880 | −3410 | 1254 | −60 | −3407 | −3585 | −3094 | −3354 | −2984 | −1743 | 3014 | −2536 | −2219 | 509 |
| — | −149 | −500 | 233 | 43 | −381 | 399 | 106 | −626 | 210 | −466 | −720 | 275 | 394 | 45 | 96 | 359 | 117 | −369 | −294 | −249 | |
| — | −16 | −7108 | −8150 | −894 | −1115 | −701 | −1378 | * | * | | | | | | | | | | | | |
| 504(Q) | −982 | −2251 | −866 | 971 | −2711 | −1822 | −252 | −2340 | 1444 | −2194 | −1356 | −464 | −1885 | 2646 | 1632 | −858 | −863 | −1958 | −2245 | −1765 | 510 |
| — | −149 | −500 | 233 | 43 | −381 | 399 | 106 | −626 | 210 | −466 | −720 | 275 | 394 | 45 | 96 | 359 | 117 | −369 | −294 | −249 | |
| — | −16 | −7108 | −8150 | −894 | −1115 | −701 | −1378 | * | * | | | | | | | | | | | | |
| 505(E) | −1162 | −2771 | 2137 | 2239 | −3046 | −1526 | −626 | −2849 | −546 | −2792 | −1983 | −145 | −1905 | −242 | −1192 | −940 | 1396 | −2385 | −2990 | −2169 | 511 |
| — | −149 | −500 | 233 | 43 | −381 | 399 | 106 | −626 | 210 | −466 | −720 | 275 | 394 | 45 | 96 | 359 | 117 | −369 | −294 | −249 | |
| — | −16 | −7108 | −8150 | −894 | −1115 | −701 | −1378 | * | * | | | | | | | | | | | | |
| 506(G) | −1707 | −2684 | 1591 | −614 | −3783 | 3190 | −1613 | −3795 | −1887 | −3775 | −3119 | −915 | −2456 | −1358 | −2539 | −1610 | −1924 | −3150 | −3636 | −3124 | 512 |
| — | −149 | −500 | 233 | 43 | −381 | 399 | 106 | −626 | 210 | −466 | −720 | 275 | 394 | 45 | 96 | 359 | 117 | −369 | −294 | −249 | |
| — | −16 | −7108 | −8150 | −894 | −1115 | −701 | −1378 | * | * | | | | | | | | | | | | |
| 507(D) | −2784 | −3432 | 4016 | −1200 | −4140 | −2466 | −2197 | −4505 | −2621 | −4365 | −3956 | −1551 | −3014 | −2039 | −3232 | −2593 | −2938 | −4046 | −3710 | −3552 | 513 |
| — | −149 | −500 | 233 | 43 | −381 | 399 | 106 | −626 | 210 | −466 | −720 | 275 | 394 | 45 | 96 | 359 | 117 | −369 | −294 | −249 | |
| — | −16 | −7108 | −8150 | −894 | −1115 | −701 | −1378 | * | * | | | | | | | | | | | | |
| 508(M) | −473 | −522 | −1819 | −1236 | −468 | −1879 | −687 | 1519 | −996 | 566 | 1677 | −1154 | −1937 | 836 | −1131 | 1079 | −413 | 102 | −957 | −585 | 514 |
| — | −149 | −500 | 233 | 43 | −381 | 399 | 106 | −626 | 210 | −466 | −720 | 275 | 394 | 45 | 96 | 359 | 117 | −369 | −294 | −249 | |
| — | −16 | −7108 | −8150 | −894 | −1115 | −701 | −1378 | * | * | | | | | | | | | | | | |
| 509(I) | −1761 | −1312 | −4317 | −3954 | −1713 | −4027 | −3703 | 3225 | −3814 | −556 | −498 | −3712 | −3859 | −3653 | −3877 | −3344 | −1754 | 2110 | −3216 | −2787 | 515 |
| — | −149 | −500 | 233 | 43 | −381 | 399 | 106 | −626 | 210 | −466 | −720 | 275 | 394 | 45 | 96 | 359 | 117 | −369 | −294 | −249 | |
| — | −16 | −7108 | −8150 | −894 | −1115 | −701 | −1378 | * | * | | | | | | | | | | | | |
| 510(T) | 782 | −1467 | −550 | 1029 | −2202 | −1425 | −709 | −1791 | −472 | −1993 | −1203 | −528 | −1787 | −368 | −902 | −617 | 2685 | −1400 | −2333 | −1783 | 516 |
| — | −149 | −500 | 233 | 43 | −381 | 399 | 106 | −626 | 210 | −466 | −720 | 275 | 394 | 45 | 96 | 359 | 117 | −369 | −294 | −249 | |
| — | −16 | −7108 | −8150 | −894 | −1115 | −701 | −1378 | * | * | | | | | | | | | | | | |
| 511(I) | −1766 | −1333 | −4283 | −3923 | −1635 | −3967 | −3619 | 3388 | −3759 | −473 | −437 | −3672 | −3822 | −3576 | −3804 | −3285 | −1764 | 1695 | −3126 | −2717 | 517 |
| — | −149 | −500 | 233 | 43 | −381 | 399 | 106 | −626 | 210 | −466 | −720 | 275 | 394 | 45 | 96 | 359 | 117 | −369 | −294 | −249 | |
| — | −16 | −7108 | −8150 | −894 | −1115 | −701 | −1378 | * | * | | | | | | | | | | | | |
| 512(D) | −2784 | −3432 | 4016 | −1200 | −4140 | −2466 | −2197 | −4505 | −2621 | −4365 | −3956 | −1551 | −3014 | −2039 | −3232 | −2593 | −2938 | −4046 | −3710 | −3552 | 518 |
| — | −149 | −500 | 233 | 43 | −381 | 399 | 106 | −626 | 210 | −466 | −720 | 275 | 394 | 45 | 96 | 359 | 117 | −369 | −294 | −249 | |
| — | −16 | −7108 | −8150 | −894 | −1115 | −701 | −1378 | * | * | | | | | | | | | | | | |
| 513(A) | 2705 | −1451 | −1036 | −913 | −2506 | −1504 | −1143 | −2174 | −794 | −2337 | −1613 | −946 | −1993 | 2040 | −1061 | −809 | −910 | −1703 | −2633 | −2156 | 519 |
| — | −149 | −500 | 233 | 43 | −381 | 399 | 106 | −626 | 210 | −466 | −720 | 275 | 394 | 45 | 96 | 359 | 117 | −369 | −294 | −249 | |
| — | −16 | −7108 | −8150 | −894 | −1115 | −701 | −1378 | * | * | | | | | | | | | | | | |
| 514(H) | −615 | −1680 | 1444 | 66 | −1883 | 168 | 2650 | −1558 | −86 | −1691 | −891 | −223 | −1680 | 31 | −577 | −571 | −585 | 1267 | −2007 | −1397 | 520 |
| — | −149 | −500 | 233 | 43 | −381 | 399 | 106 | −626 | 210 | −466 | −720 | 275 | 394 | 45 | 96 | 359 | 117 | −369 | −294 | −249 | |
| — | −16 | −7108 | −8150 | −894 | −1115 | −701 | −1378 | * | * | | | | | | | | | | | | |
| 515(K) | −654 | −2006 | −546 | 42 | −2376 | −1581 | −133 | −2066 | 1935 | −1987 | −1107 | 1132 | −1658 | 1043 | 1058 | −540 | 1180 | −1660 | −2113 | −1532 | 521 |
| — | −149 | −500 | 233 | 43 | −381 | 399 | 106 | −626 | 210 | −466 | −720 | 275 | 394 | 45 | 96 | 359 | 117 | −369 | −294 | −249 | |
| — | −16 | −7108 | −8150 | −894 | −1115 | −701 | −1378 | * | * | | | | | | | | | | | | |
| 516(N) | −933 | −2085 | −946 | −284 | −2472 | −1822 | −253 | −2090 | 1711 | 76 | −1204 | 1918 | −1876 | 175 | 1799 | −841 | −817 | −1755 | −2132 | −1663 | 522 |
| — | −149 | −500 | 233 | 43 | −381 | 399 | 106 | −626 | 210 | −466 | −720 | 275 | 394 | 45 | 96 | 359 | 117 | −369 | −294 | −249 | |
| — | −16 | −7108 | −8150 | −894 | −1115 | −701 | −1378 | * | * | | | | | | | | | | | | |
| 517(E) | −416 | −987 | −843 | 1107 | −1070 | −1583 | −338 | −623 | −183 | 879 | −172 | −489 | −1679 | −94 | −565 | 544 | 813 | 265 | −1379 | −905 | 523 |
| — | −149 | −500 | 233 | 43 | −381 | 399 | 106 | −626 | 210 | −466 | −720 | 275 | 394 | 45 | 96 | 359 | 117 | −369 | −294 | −249 | |
| — | −16 | −7108 | −8150 | −894 | −1115 | −701 | −1378 | * | * | | | | | | | | | | | | |
| 518(I) | −2258 | −1804 | −4588 | −4084 | −706 | −4269 | −3231 | 2527 | −3807 | 2292 | 465 | −3923 | −3814 | −3118 | −3570 | −3544 | −2181 | 190 | −2303 | −2237 | 524 |
| — | −149 | −500 | 233 | 43 | −381 | 399 | 106 | −626 | 210 | −466 | −720 | 275 | 394 | 45 | 96 | 359 | 117 | −369 | −294 | −249 | |
| — | −16 | −7108 | −8150 | −894 | −1115 | −701 | −1378 | * | * | | | | | | | | | | | | |
| 519(Q) | −477 | −1909 | 958 | 282 | −2211 | −1389 | 1484 | −1953 | 285 | −1921 | −1018 | −32 | −1517 | 2318 | −225 | 630 | 559 | −1525 | −2110 | −1430 | 525 |
| — | −149 | −500 | 233 | 43 | −381 | 399 | 106 | −626 | 210 | −466 | −720 | 275 | 394 | 45 | 96 | 359 | 117 | −369 | −294 | −249 | |
| — | −16 | −7108 | −8150 | −894 | −1115 | −701 | −1378 | * | * | | | | | | | | | | | | |
| 520(L) | −2127 | −1743 | −4402 | −3796 | 1257 | −3918 | −2674 | 149 | −3492 | 2527 | 2164 | −3553 | −3509 | −2714 | −3181 | −3095 | −2019 | 570 | −1870 | −1818 | 526 |
| — | −149 | −500 | 233 | 43 | −381 | 399 | 106 | −626 | 210 | −466 | −720 | 275 | 394 | 45 | 96 | 359 | 117 | −369 | −294 | −249 | |
| — | −16 | −7108 | −8150 | −894 | −1115 | −701 | −1378 | * | * | | | | | | | | | | | | |
| 521(N) | −723 | −2217 | 958 | 236 | −2518 | −1466 | 1611 | −2279 | 1719 | −2217 | −1334 | 2285 | −1666 | 166 | −401 | −570 | −677 | −1837 | −2382 | −1678 | 527 |
| — | −149 | −500 | 233 | 43 | −381 | 399 | 106 | −626 | 210 | −466 | −720 | 275 | 394 | 45 | 96 | 359 | 117 | −369 | −294 | −249 | |
| — | −16 | −7108 | −8150 | −894 | −1115 | −701 | −1378 | * | * | | | | | | | | | | | | |
| 522(V) | −1754 | −1297 | −4330 | −3968 | −1770 | −4053 | −3752 | 2623 | −3841 | −620 | −545 | −3729 | −3878 | −3699 | −3918 | −3371 | −1746 | 2846 | −3277 | −2830 | 528 |
| — | −149 | −500 | 233 | 43 | −381 | 399 | 106 | −626 | 210 | −466 | −720 | 275 | 394 | 45 | 96 | 359 | 117 | −369 | −294 | −249 | |
| — | −16 | −7108 | −8150 | −894 | −1115 | −701 | −1378 | * | * | | | | | | | | | | | | |
| 523(S) | 1545 | −974 | −2003 | −1825 | −2867 | −1206 | −1790 | −2580 | −1788 | −2795 | −1932 | −1362 | 1826 | −1586 | −1999 | 2362 | −672 | −1755 | −3057 | −2721 | 529 |
| — | −149 | −500 | 233 | 43 | −381 | 399 | 106 | −626 | 210 | −466 | −720 | 275 | 394 | 45 | 96 | 359 | 117 | −369 | −294 | −249 | |
| — | −16 | −7108 | −8150 | −894 | −1115 | −701 | −1378 | * | * | | | | | | | | | | | | |
| 524(D) | −1776 | −3649 | 3326 | 1869 | −3838 | −1642 | −1031 | −3788 | −1322 | −3660 | −3029 | −245 | −2192 | −711 | −2201 | −1425 | −1855 | −3264 | −3821 | −2816 | 530 |
| — | −149 | −500 | 233 | 43 | −381 | 399 | 106 | −626 | 210 | −466 | −720 | 275 | 394 | 45 | 96 | 359 | 117 | −369 | −294 | −249 | |
| — | −16 | −7108 | −8150 | −894 | −1115 | −701 | −1378 | * | * | | | | | | | | | | | | |
| 525(E) | 423 | −2950 | 1944 | 2696 | −3223 | −1545 | −718 | −3047 | −715 | −2979 | −2196 | −161 | −1968 | −347 | −1403 | −1043 | −1314 | −2569 | −3177 | −2316 | 531 |
| — | −149 | −500 | 233 | 43 | −381 | 399 | 106 | −626 | 210 | −466 | −720 | 275 | 394 | 45 | 96 | 359 | 117 | −369 | −294 | −249 | |
| — | −16 | −7108 | −8150 | −894 | −1115 | −701 | −1378 | * | * | | | | | | | | | | | | |
| 526(E) | −2641 | −3308 | −896 | 3732 | −3966 | −2458 | −2043 | −4105 | −2128 | −4016 | −3555 | −1531 | −2959 | −1842 | −2560 | −2479 | −2750 | −3722 | −3563 | −3385 | 532 |
| — | −149 | −500 | 233 | 43 | −381 | 399 | 106 | −626 | 210 | −466 | −720 | 275 | 394 | 45 | 96 | 359 | 117 | −369 | −294 | −249 | |
| — | −16 | −7108 | −8150 | −894 | −1115 | −701 | −1378 | * | * | | | | | | | | | | | | |
| 527(L) | −2339 | −1899 | −4618 | −4042 | 1570 | −4204 | −2849 | 1440 | −3758 | 2558 | 676 | −3825 | −3700 | −2902 | −3418 | −3418 | −2226 | −382 | −1924 | −1778 | 533 |
| — | −149 | −500 | 233 | 43 | −381 | 399 | 106 | −626 | 210 | −466 | −720 | 275 | 394 | 45 | 96 | 359 | 117 | −369 | −294 | −249 | |
| — | −16 | −7108 | −8150 | −894 | −1115 | −701 | −1378 | * | * | | | | | | | | | | | | |
| 528(A) | 2338 | −1990 | −241 | 938 | −2395 | −1557 | −423 | −2061 | 954 | −2103 | −1286 | −301 | −1791 | −26 | −375 | −717 | −784 | −1691 | −2330 | −1728 | 534 |
| — | −149 | −500 | 233 | 43 | −381 | 399 | 106 | −626 | 210 | −466 | −720 | 275 | 394 | 45 | 96 | 359 | 117 | −369 | −294 | −249 | |
| — | −16 | −7108 | −8150 | −894 | −1115 | −701 | −1378 | * | * | | | | | | | | | | | | |
| 529(R) | 524 | −2098 | −789 | −146 | −2504 | −1729 | 1632 | −2153 | 1229 | −2054 | −1204 | −379 | −1789 | 1328 | 2313 | −719 | −724 | −1774 | −2150 | −1637 | 535 |
| — | −149 | −500 | 233 | 43 | −381 | 399 | 106 | −626 | 210 | −466 | −720 | 275 | 394 | 45 | 96 | 359 | 117 | −369 | −294 | −249 | |
| — | −16 | −7108 | −8150 | −894 | −1115 | −701 | −1378 | * | * | | | | | | | | | | | | |
| 530(R) | −2957 | −3022 | −3318 | −2735 | −3796 | −2998 | −1968 | −3912 | −846 | −3631 | −3157 | −2611 | −3280 | −1724 | 4056 | −3026 | −2913 | −3650 | −3096 | −3185 | 536 |
| — | −149 | −500 | 233 | 43 | −381 | 399 | 106 | −626 | 210 | −466 | −720 | 275 | 394 | 45 | 96 | 359 | 117 | −369 | −294 | −249 | |
| — | −16 | −7108 | −8150 | −894 | −1115 | −701 | −1378 | * | * | | | | | | | | | | | | |
| 531(R) | −1895 | −2713 | −2327 | −1192 | −3484 | −2502 | −481 | −2856 | 2144 | −2544 | −1842 | −1161 | −2458 | 1393 | 3023 | −1770 | −1619 | −2599 | −2421 | −2259 | 537 |
| — | −149 | −500 | 233 | 43 | −381 | 399 | 106 | −626 | 210 | −466 | −720 | 275 | 394 | 45 | 96 | 359 | 117 | −369 | −294 | −249 | |
| — | −16 | −7108 | −8150 | −894 | −1115 | −701 | −1378 | * | * | | | | | | | | | | | | |
| 532(A) | 2935 | −1714 | −553 | 857 | −2769 | −1546 | −1218 | −2333 | −1106 | −2591 | −1873 | −809 | −2065 | −934 | −1502 | −954 | −1103 | −1872 | −2898 | −2374 | 538 |
| — | −149 | −500 | 233 | 43 | −381 | 399 | 106 | −626 | 210 | −466 | −720 | 275 | 394 | 45 | 96 | 359 | 117 | −369 | −294 | −249 | |
| — | −16 | −7108 | −8150 | −894 | −1115 | −701 | −1378 | * | * | | | | | | | | | | | | |
| 533(A) | 1291 | −1874 | −176 | 1227 | −2177 | −1392 | −109 | −1909 | 277 | −1891 | −995 | 1134 | −1522 | 1248 | −228 | −361 | 562 | −1492 | −2090 | −1419 | 539 |
| — | −149 | −500 | 233 | 43 | −381 | 399 | 106 | −626 | 210 | −466 | −720 | 275 | 394 | 45 | 96 | 359 | 117 | −369 | −294 | −249 | |
| — | −16 | −7108 | −8150 | −894 | −1115 | −701 | −1378 | * | * | | | | | | | | | | | | |
| 534(W) | −805 | −687 | −2581 | −2028 | 138 | −2236 | −697 | 897 | −1681 | −421 | 141 | −1645 | −2282 | −1369 | −1627 | −1315 | 636 | −90 | 4479 | 1809 | 540 |
| — | −149 | −500 | 233 | 43 | −381 | 399 | 106 | −626 | 210 | −466 | −720 | 275 | 394 | 45 | 96 | 359 | 117 | −369 | −294 | −249 | |
| — | −16 | −7108 | −8150 | −894 | −1115 | −701 | −1378 | * | * | | | | | | | | | | | | |
| 535(H) | −408 | −1801 | −274 | 1284 | −2096 | −1385 | 1500 | −1822 | 1168 | −1802 | −899 | −33 | −1479 | 1381 | −102 | −303 | 595 | 221 | −1996 | −1339 | 541 |
| — | −149 | −500 | 233 | 43 | −381 | 399 | 106 | −626 | 210 | −466 | −720 | 275 | 394 | 45 | 96 | 359 | 117 | −369 | −294 | −249 | |
| — | −16 | −7108 | −8150 | −894 | −1115 | −701 | −1378 | * | * | | | | | | | | | | | | |
| 536(Q) | −650 | −1737 | −627 | −72 | −1981 | −1615 | −209 | −1625 | 1223 | 392 | −866 | −318 | 1222 | 2120 | 50 | −598 | −572 | −1326 | −1932 | −1394 | 542 |
| — | −149 | −500 | 233 | 43 | −381 | 399 | 106 | −626 | 210 | −466 | −720 | 275 | 394 | 45 | 96 | 359 | 117 | −369 | −294 | −249 | |
| — | −16 | −7108 | −8150 | −894 | −1115 | −701 | −1378 | * | * | | | | | | | | | | | | |
| 537(P) | −2931 | −2878 | −3420 | −3706 | −4181 | −2925 | −3468 | −4621 | −3859 | −4490 | −4165 | −3491 | 4225 | −3781 | −3695 | −3182 | −3279 | −4087 | −3594 | −4064 | 543 |
| — | −149 | −500 | 233 | 43 | −381 | 399 | 106 | −626 | 210 | −466 | −720 | 275 | 394 | 45 | 96 | 359 | 117 | −369 | −294 | −249 | |
| — | −324 | −7108 | −2368 | −894 | −1115 | −701 | −1378 | * | * | | | | | | | | | | | | |
| 538(A) | 2195 | −924 | −968 | −546 | −1397 | −1356 | −583 | −812 | −365 | −1167 | −487 | −618 | −1660 | 1324 | −684 | −483 | −404 | 462 | −1703 | −1242 | 544 |
| — | −149 | −500 | 233 | 43 | −381 | 399 | 106 | −626 | 210 | −466 | −720 | 275 | 394 | 45 | 96 | 359 | 117 | −369 | −294 | −249 | |
| — | −19 | −6804 | −7846 | −894 | −1115 | −428 | −1961 | * | * | | | | | | | | | | | | |
| 539(P) | 411 | −1017 | −1886 | −1616 | −1600 | −1588 | −1411 | −962 | −1408 | 495 | −755 | −1384 | 3156 | −1323 | −1577 | −847 | −785 | −783 | −2111 | −1716 | 545 |
| — | −149 | −500 | 233 | 43 | −381 | 399 | 106 | −626 | 210 | −466 | −720 | 275 | 394 | 45 | 96 | 359 | 117 | −369 | −294 | −249 | |
| — | −16 | −7108 | −8150 | −894 | −1115 | −701 | −1378 | * | * | | | | | | | | | | | | |
| 540(R) | −1612 | −2397 | −2037 | −1033 | −2897 | −2352 | −458 | −2365 | 2184 | 665 | −1520 | −1051 | −2334 | −51 | 2602 | −1545 | −1395 | −2143 | −2262 | −2014 | 546 |
| — | −149 | −500 | 233 | 43 | −381 | 399 | 106 | −626 | 210 | −466 | −720 | 275 | 394 | 45 | 96 | 359 | 117 | −369 | −294 | −249 | |
| — | −16 | −7108 | −8150 | −894 | −1115 | −701 | −1378 | * | * | | | | | | | | | | | | |
| 541(Y) | 712 | −796 | −2334 | −1883 | −370 | −2028 | −986 | −143 | −1607 | −663 | −131 | −1587 | −2243 | −1383 | −1656 | −1178 | −771 | 1114 | −965 | 3479 | 547 |
| — | −149 | −500 | 233 | 43 | −381 | 399 | 106 | −626 | 210 | −466 | −720 | 275 | 394 | 45 | 96 | 359 | 117 | −369 | −294 | −249 | |
| — | −16 | −7108 | −8150 | −894 | −1115 | −701 | −1378 | * | * | | | | | | | | | | | | |
| 542(T) | −527 | −1669 | 1091 | −27 | −2315 | −1379 | −443 | −2033 | −151 | −2081 | −1218 | −282 | 557 | −41 | −650 | 1128 | 2077 | −1576 | −2321 | −1690 | 548 |
| — | −149 | −500 | 233 | 43 | −381 | 399 | 106 | −626 | 210 | −466 | −720 | 275 | 394 | 45 | 96 | 359 | 117 | −369 | −294 | −249 | |
| — | −16 | −7108 | −8150 | −894 | −1115 | −701 | −1378 | * | * | | | | | | | | | | | | |
| 543(R) | −2957 | −3022 | −3318 | −2735 | −3796 | −2998 | −1968 | −3912 | −846 | −3631 | −3157 | −2611 | −3280 | −1724 | 4056 | −3026 | −2913 | −3650 | −3096 | −3185 | 549 |
| — | −149 | −500 | 233 | 43 | −381 | 399 | 106 | −626 | 210 | −466 | −720 | 275 | 394 | 45 | 96 | 359 | 117 | −369 | −294 | −249 | |
| — | −16 | −7108 | −8150 | −894 | −1115 | −701 | −1378 | * | * | | | | | | | | | | | | |
| 544(G) | −2594 | −2690 | −3304 | −3623 | −4328 | 3747 | −3462 | −4761 | −3953 | −4671 | −4212 | −3320 | −3352 | −3748 | −3779 | −2839 | −2981 | −4004 | −3668 | −4222 | 550 |
| — | −149 | −500 | 233 | 43 | −381 | 399 | 106 | −626 | 210 | −466 | −720 | 275 | 394 | 45 | 96 | 359 | 117 | −369 | −294 | −249 | |
| — | −16 | −7108 | −8150 | −894 | −1115 | −701 | −1378 | * | * | | | | | | | | | | | | |
| 545(V) | −1747 | −1296 | −4310 | −3948 | −1758 | −4023 | −3716 | 2215 | −3813 | −615 | −540 | −3705 | −3860 | −3670 | −3887 | −3339 | −1741 | 3087 | −3252 | −2806 | 551 |
| — | −149 | −500 | 233 | 43 | −381 | 399 | 106 | −626 | 210 | −466 | −720 | 275 | 394 | 45 | 96 | 359 | 117 | −369 | −294 | −249 | |
| — | −16 | −7108 | −8150 | −894 | −1115 | −701 | −1378 | * | * | | | | | | | | | | | | |
| 546(L) | −2871 | −2457 | −4231 | −4103 | −1033 | −3803 | −3165 | −541 | −3734 | 3130 | −31 | −3935 | −3797 | −3286 | −3484 | −3713 | −2869 | −1136 | −2394 | −2220 | 552 |
| — | −149 | −500 | 233 | 43 | −381 | 399 | 106 | −626 | 210 | −466 | −720 | 275 | 394 | 45 | 96 | 359 | 117 | −369 | −294 | −249 | |
| — | −16 | −7108 | −8150 | −894 | −1115 | −701 | −1378 | * | * | | | | | | | | | | | | |
| 547(A) | 2404 | −890 | −1926 | −1629 | −1803 | 1275 | −1415 | −1282 | −1490 | 392 | −963 | −1316 | −1930 | −1328 | −1674 | −654 | −644 | −952 | −2187 | −1810 | 553 |
| — | −149 | −500 | 233 | 43 | −381 | 399 | 106 | −626 | 210 | −466 | −720 | 275 | 394 | 45 | 96 | 359 | 117 | −369 | −294 | −249 | |
| — | −16 | −7108 | −8150 | −894 | −1115 | −701 | −1378 | * | * | | | | | | | | | | | | |
| 548(K) | −2620 | −2961 | −2461 | −2046 | −3743 | −2791 | −1570 | −3603 | 3784 | −3387 | −2839 | −2048 | −3039 | −1260 | −465 | −2604 | −2536 | −3331 | −3001 | −2988 | 554 |
| — | −149 | −500 | 233 | 43 | −381 | 399 | 106 | −626 | 210 | −466 | −720 | 275 | 394 | 45 | 96 | 359 | 117 | −369 | −294 | −249 | |
| — | −16 | −7108 | −8150 | −894 | −1115 | −701 | −1378 | * | * | | | | | | | | | | | | |
| 549(Y) | −3621 | −2707 | −4176 | −4424 | 2950 | −4049 | −394 | −2539 | −4002 | −1942 | −1987 | −2749 | −3933 | −2854 | −3451 | −3299 | −3499 | −2690 | 349 | 4094 | 555 |
| — | −149 | −500 | 233 | 43 | −381 | 399 | 106 | −626 | 210 | −466 | −720 | 275 | 394 | 45 | 96 | 359 | 117 | −369 | −294 | −249 | |
| — | −16 | −7108 | −8150 | −894 | −1115 | −701 | −1378 | * | * | | | | | | | | | | | | |
| 550(A) | 3438 | −1472 | −2846 | −3040 | −3287 | −1726 | −2735 | −2840 | −3028 | −3257 | −2662 | −2236 | −2447 | −2798 | −2944 | −1216 | −1387 | −2183 | −3405 | −3320 | 556 |
| — | −149 | −500 | 233 | 43 | −381 | 399 | 106 | −626 | 210 | −466 | −720 | 275 | 394 | 45 | 96 | 359 | 117 | −369 | −294 | −249 | |
| — | −16 | −7108 | −8150 | −894 | −1115 | −701 | −1378 | * | * | | | | | | | | | | | | |
| 551(H) | −1741 | −2627 | −2070 | −1046 | −3303 | −2401 | 2713 | −2751 | 2478 | −2476 | −1755 | −1061 | −2375 | −27 | 2379 | −1621 | −1497 | −2477 | −2379 | −2161 | 557 |
| — | −149 | −500 | 233 | 43 | −381 | 399 | 106 | −626 | 210 | −466 | −720 | 275 | 394 | 45 | 96 | 359 | 117 | −369 | −294 | −249 | |
| — | −16 | −7108 | −8150 | −894 | −1115 | −701 | −1378 | * | * | | | | | | | | | | | | |
| 552(L) | −1014 | −876 | −2956 | −2408 | −582 | −2550 | −1529 | 1721 | −2079 | 2042 | 345 | −2114 | −2581 | −1775 | −2028 | 454 | −980 | 286 | −1414 | −1096 | 558 |
| — | −149 | −500 | 233 | 43 | −381 | 399 | 106 | −626 | 210 | −466 | −720 | 275 | 394 | 45 | 96 | 359 | 117 | −369 | −294 | −249 | |
| — | −16 | −7108 | −8150 | −894 | −1115 | −701 | −1378 | * | * | | | | | | | | | | | | |
| 553(V) | 933 | −842 | −2818 | −2467 | −1542 | −1870 | −1890 | 154 | −2226 | −1095 | −617 | −1932 | −2326 | −1995 | −2259 | −1126 | 1070 | 2769 | −2180 | −1826 | 559 |
| — | −149 | −500 | 233 | 43 | −381 | 399 | 106 | −626 | 210 | −466 | −720 | 275 | 394 | 45 | 96 | 359 | 117 | −369 | −294 | −249 | |
| — | −16 | −7108 | −8150 | −894 | −1115 | −701 | −1378 | * | * | | | | | | | | | | | | |
| 554(S) | −787 | −1522 | −1486 | −1172 | −2714 | −1599 | −1112 | −2500 | −433 | −2563 | −1791 | −1110 | −2067 | −796 | 1351 | 2916 | −989 | −1943 | −2648 | −2234 | 560 |
| — | −149 | −500 | 233 | 43 | −381 | 399 | 106 | −626 | 210 | −466 | −720 | 275 | 394 | 45 | 96 | 359 | 117 | −369 | −294 | −249 | |
| — | −16 | −7108 | −8150 | −894 | −1115 | −701 | −1378 | * | * | | | | | | | | | | | | |
| 555(S) | −326 | −1010 | −1779 | −1541 | −2691 | −1234 | −1566 | −2386 | −1486 | −2594 | −1749 | −1228 | 1196 | −1330 | −1747 | 2396 | 1967 | −1662 | −2876 | −2496 | 561 |
| — | −149 | −500 | 233 | 43 | −381 | 399 | 106 | −626 | 210 | −466 | −720 | 275 | 394 | 45 | 96 | 359 | 117 | −369 | −294 | −249 | |
| — | −16 | −7108 | −8150 | −894 | −1115 | −701 | −1378 | * | * | | | | | | | | | | | | |
| 556(A) | 3121 | −934 | −2489 | −2561 | −3081 | −1203 | −2295 | −2766 | −2533 | −3080 | −2234 | −1669 | −1953 | −2234 | −2533 | 936 | −746 | −1844 | −3331 | −3090 | 562 |
| — | −149 | −500 | 233 | 43 | −381 | 399 | 106 | −626 | 210 | −466 | −720 | 275 | 394 | 45 | 96 | 359 | 117 | −369 | −294 | −249 | |
| — | −16 | −7108 | −8150 | −894 | −1115 | −701 | −1378 | * | * | | | | | | | | | | | | |
| 557(S) | −897 | −1462 | −2333 | −2543 | −3185 | −1640 | −2474 | −3294 | −2686 | −3497 | −2780 | −1973 | −2360 | −2483 | −2703 | 3465 | −1316 | −2413 | −3310 | −3025 | 563 |
| — | −149 | −500 | 233 | 43 | −381 | 399 | 106 | −626 | 210 | −466 | −720 | 275 | 394 | 45 | 96 | 359 | 117 | −369 | −294 | −249 | |
| — | −16 | −7108 | −8150 | −894 | −1115 | −701 | −1378 | * | * | | | | | | | | | | | | |
| 558(R) | −586 | −1873 | −516 | 979 | −2188 | −1543 | −123 | −1869 | 1290 | −353 | −980 | −202 | −1622 | 314 | 1886 | −491 | 782 | −1495 | −2024 | −1439 | 564 |
| — | −149 | −500 | 233 | 43 | −381 | 399 | 106 | −626 | 210 | −466 | −720 | 275 | 394 | 45 | 96 | 359 | 117 | −369 | −294 | −249 | |
| — | −16 | −7108 | −8150 | −894 | −1115 | −701 | −1378 | * | * | | | | | | | | | | | | |
| 559(G) | −2594 | −2690 | −3304 | −3623 | −4328 | 3747 | −3462 | −4761 | −3953 | −4671 | −4212 | −3320 | −3352 | −3748 | −3779 | −2839 | −2981 | −4004 | −3668 | −4222 | 565 |
| — | −149 | −500 | 233 | 43 | −381 | 399 | 106 | −626 | 210 | −466 | −720 | 275 | 394 | 45 | 96 | 359 | 117 | −369 | −294 | −249 | |
| — | −16 | −7108 | −8150 | −894 | −1115 | −701 | −1378 | * | * | | | | | | | | | | | | |
| 560(C) | 2804 | 3772 | −3185 | −3198 | −2739 | −1303 | −2462 | −2065 | −2882 | −2628 | −1924 | −1927 | −2044 | −2547 | −2727 | −661 | −799 | −1463 | −3099 | −2886 | 566 |
| — | −149 | −500 | 233 | 43 | −381 | 399 | 106 | −626 | 210 | −466 | −720 | 275 | 394 | 45 | 96 | 359 | 117 | −369 | −294 | −249 | |
| — | −16 | −7108 | −8150 | −894 | −1115 | −701 | −1378 | * | * | | | | | | | | | | | | |
| 561(V) | −1771 | −1603 | −3750 | −3689 | −2037 | −3050 | −3231 | 403 | −3479 | −1154 | −1076 | −3246 | −3399 | −3383 | −3437 | −2628 | −1917 | 3536 | −3074 | −2677 | 567 |
| — | −149 | −500 | 233 | 43 | −381 | 399 | 106 | −626 | 210 | −466 | −720 | 275 | 394 | 45 | 96 | 359 | 117 | −369 | −294 | −249 | |
| — | −16 | −7108 | −8150 | −894 | −1115 | −701 | −1378 | * | * | | | | | | | | | | | | |
| 562(T) | −1213 | −1674 | −2755 | −2906 | −3163 | −1922 | −2659 | −2698 | −2788 | −3105 | −2612 | −2311 | −2600 | −2708 | −2753 | −1463 | 3819 | −2197 | −3286 | −3156 | 568 |
| — | −149 | −500 | 233 | 43 | −381 | 399 | 106 | −626 | 210 | −466 | −720 | 275 | 394 | 45 | 96 | 359 | 117 | −369 | −294 | −249 | |
| — | −16 | −7108 | −8150 | −894 | −1115 | −701 | −1378 | * | * | | | | | | | | | | | | |
| 563(D) | −2784 | −3432 | 4016 | −1200 | −4140 | −2466 | −2197 | −4505 | −2621 | −4365 | −3956 | −1551 | −3014 | −2039 | −3232 | −2593 | −2938 | −4046 | −3710 | −3552 | 569 |
| — | −149 | −500 | 233 | 43 | −381 | 399 | 106 | −626 | 210 | −466 | −720 | 275 | 394 | 45 | 96 | 359 | 117 | −369 | −294 | −249 | |
| — | −21 | −6715 | −7757 | −894 | −1115 | −701 | −1378 | * | * | | | | | | | | | | | | |
| 564(F) | −525 | −445 | −2202 | −1627 | 1946 | −2001 | −744 | 1247 | −1346 | 952 | 561 | 1079 | −2030 | −1067 | −1362 | −1067 | −465 | 338 | −714 | −230 | 570 |
| — | * | * | * | * | * | * | * | * | * | * | * | * | * | * | * | * | * | * | * | * | |
| — | * | * | * | * | * | * | * | * | 0 | | | | | | | | | | | | |

| | |
|---|---|
| HMMER2.0 [2.2g] | Program name and version |
| NAME dhad_for_hmm | Name of the input sequence alignment file |
| LENG 564 | Length of the alignment: include indels |
| ALPH Amino | Type of residues |
| MAP yes | Map of the match states to the columns of the alignment |
| COM/app/public/hmmer/current/bin/hmmbuild -F dhad-exp_hmm dhad_for_hmm.aln | Commands used to generate the file: this one means that hmmbuild (default patrameters) |
| | was applied to the alignment file |
| COM/app/public/hmmer/current/bin/hmmcalibrate dhad-exp_hmm | Commands used to generate the file: this one means that hmmcalibrate (default parametrs) |
| | was applied to the hmm profile |
| NSEQ 8 | Number of sequences in the alignment file |
| DATE Tue Jun 3 10:48:24 2008 | When was the file generated |
| XT −8455 −4 −1000 −1000 −8455 −4 −8455 −4 | |
| NULT −4 −8455 | The transition probability distribution for the null model (single G state). |
| NULE 595 −1558 85 338 −294 453 −1158 197 249 902 −1085 −142 −21 −313 45 531 201 384 −1998 | The symbol emission probability distribution for the null model (G state); |
| | consists of K (e.g. 4 or 20) integers. The null probability used to convert these back to model probabilities is 1/K. |
| | The extreme value distribution parameters μ and lambda respectively; both floating point values. |
| | Lambda is positive and nonzero. |
| EVD −499.650970 0.086142 | These values are set when the model is calibrated with hmmcalibrate. |

What is claimed is:

1. A lactic acid bacterial cell comprising a functional dihydroxy-acid dehydratase polypeptide and at least one recombinant genetic expression element encoding iron-sulfur cluster forming proteins.

2. The lactic acid bacterial cell of claim 1 wherein the functional dihydroxy-acid dehydratase polypeptide is encoded by a nucleic acid molecule that is heterologous to the bacteria.

3. The lactic acid bacterial cell of claim 2 wherein the functional dihydroxyacid dehydratase polypeptide is a [2Fe-2S]2+ dihydroxy-acid dehydratase.

4. The lactic acid bacterial cell of claim 2 wherein the functional dihydroxyacid dehydratase polypeptide is a [4Fe-4S]2+ dihydroxy-acid dehydratase.

5. The lactic acid bacterial cell of claim 2 wherein the dihydroxyacid dehydratase polypeptide has an amino acid sequence that matches the Profile HMM of table 7 with an E value of <10⁻⁵ wherein the polypeptide additionally comprises all three conserved cysteines, corresponding to positions 56, 129, and 201 in the amino acids sequences of the Streptococcus mutans DHAD enzyme corresponding to SEQ ID NO:168.

6. The lactic acid bacterial cell of claim 1 wherein the recombinant genetic expression element encoding iron-sulfur cluster forming proteins contains coding regions of an operon selected from the group consisting of Isc, Suf and Nif operons.

7. The lactic acid bacterial cell of claim 6 wherein the Suf operon comprises at least one coding region selected from the group consisting of SufC, Suf D, Suf S, SufU, Suf B, SufA and yseH.

8. The lactic acid bacterial cell of claim 6 wherein the Isc operon comprises at least one coding region selected from the group consisting of IscS, IscU, IscA, IscX, HscA, HscB, and Fdx.

9. The lactic acid bacterial cell of claim 6 wherein the Nif operon comprises at least one coding region selected from the group consisting of NifS and NifU.

10. The lactic acid bacterial cell of claim 7 wherein the Suf operon is derived from Lactococcus lactis or Lactobacillus plantarum.

11. The lactic acid bacterial cell of claim 8 wherein the Isc operon is derived from E. Coli.

12. The lactic acid bacterial cell of claim 9 wherein the Nif operon is derived from Wolinella succinogenes.

13. The lactic acid bacterial cell of claim 1 wherein the bacteria is a member of a genus selected from the group consisting of Lactococcus, Lactobacillus, Leuconostoc, Oenococcus, Pediococcus, and Streptococcus.

14. The lactic acid bacterial cell of claim 1 wherein the bacteria produces isobutanol.

15. The lactic acid bacterial cell of claim 1 comprising an isobutanol biosynthetic pathway.

16. The lactic acid bacterial cell of claim 15 wherein the isobutanol biosynthetic pathway comprises genes encoding acetolactate synthase, acetohydroxy acid isomeroreductase, dihydroxy-acid dehydratase, branched-chain α-keto acid decarboxylase, and branched-chain alcohol dehydrogenase.

17. A method for increasing the activity of a heterologous dihydroxyacid dehydratase polypeptide in a lactic acid bacterial cell comprising:
a) providing a lactic acid bacterial cell comprising:
1) a nucleic acid molecule encoding a heterologous dihydroxyacid dehydratase polypeptide; and
2) a recombinant genetic expression element encoding iron-sulfur cluster forming proteins, wherein the proteins are expressed; and
b) growing the lactic acid bacterial cell of (a) under conditions whereby the dihydroxy-acid dehydratase polypeptide is expressed in functional form having a specific activity greater than the same dihydroxy-acid dehydratase polypeptide expressed in the same bacterial cell lacking the recombinant genetic expression element encoding iron-sulfur cluster forming proteins.

18. The method of claim 17 wherein the specific activity of the dihydroxyacid dehydratase polypeptide expressed in functional form is at least about two fold greater than the specific activity of the same dihydroxyacid dehydratase polypeptide expressed in the same bacteria lacking the recombinant genetic expression element encoding iron-sulfur cluster forming proteins.

19. A method of making isobutanol comprising providing the lactic acid bacterial cell of claim 15 and growing said cell under conditions wherein isobutanol is produced.

The application's sequence listing, which the Patent Office published only in electronic form, follows.

SEQUENCE LISTING (881 sequences)

SEQ ID NO: 1 - DNA, 1743 bp, Mycobacterium sp.
atgccctcaggaagttcaggaactcccgctgatgctcttcgcgcgagcgactcatcgccggacatcaagccccgcagccgcgacgtcaccgacggcctcgagaagaccgccgcccgcgggatgctgcgggcggtcggcatgggcgacgacgactgggtcaaaccgcagatcggcgtgggttcgtcgtggaacgagatcaccccgtgcaacatgtcgctgcaacggctggcgcagtcggtgaagggcggcgtgcactccgccggcggatttccgctggagttcggcacgatctcggtgtccgacggcatctcgatgggccacgagggcatgcacttctcgctggtctcgcgtgaggtgatcgccgacagcgtcgagaccgtcgtgcaggccgagcgtctcgacggcacggtgctgctggccggctgcgacaagtcgattcccggcatgctgatggccgccgcccggctcgacctggcctcggtcttcctgtacaacggttcgatcatgccgggcgtcgcgaagctcaccgacggctccgagcgggaagtcacgatcatcgacgccttcgaggcggtcggggcgtgcgcccgcgggctgatgtcccgcgaggacgtcgacatcatcgaacgggcgatctgtccgggtgagggcgcctgcggcggtatgtacaccgccaacaccatggcgtcggcggcggaagcgctcggcatgtcgttgccgggcagcgcatctcctgtggccatcgacaagcggcgcgacgagtacgcgcggaagtcgggtgaggcggtcgtcgagatgctgcgccgcggtatcaccgcccgcgacatcctcaccaaggaggccttcgagaacgcgatcgccgtcgtcatggcgttcggcggctccaccaacgccgtgctgcacctgctggccatcgcgtgggaggccaacgtgaagctcaccctcgaggacttcacccgcgtcgggcagaaggtgccgcacctcgccgacgtcaaaccgttcggccgtcacgtcatgaagcacgtcgacgagatcggcggtgtgcccgtggtgatgaaggcgctgctggacgccggactgctgcacggggactgcctcaccatcaccggcgagaccatggccgagaacctggcccacatcgaaccgccggacccggacggcaaggtgctgcgggcgatgaacaacccgatccacccgaccggcggcatcacgatcctgcacggatcgttggcgcccgagggcgcggtcgtgaagtcggcgggcttcgactccgacgtgttcgagggcaccgcaagggttttcgagcgggagcgggcagccctggacgcactcgaggacggcacgatcacccacggcgacgtcgtcgtcatccgctacgagggacccaagggcgggcccgggatgcgcgagatgctcgccatcaccggtgcgatcaagggtgccggcctgggcaaggacgtgctgctgatgaccgacggccggttctccggcggcaccaccggcctgtgcgtcgggcatatcgcccccgaggcggtcgacggcgggcccatcgcgttcgtgcgcgacggcgaccggatccggctcgacgtcgccaagggcacgctggacctcctggtcgacgaggccgaattcgagtcccgcaaagcgggattcgagccgttgcccccggtgtacaccaccggcgtgctggccaagtacacgaagttggtcgggtcggcggcggtcggcgcggtctgcggctag

SEQ ID NO: 2 - protein, 580 aa, Mycobacterium sp.
MPSGSSGTPADALRASDSSPDIKPRSRDVTDGLEKTAARGMLRAVGMGDDDWVKPQIGVGSSWNEITPCNMSLQRLAQSVKGGVHSAGGFPLEFGTISVSDGISMGHEGMHFSLVSREVIADSVETVVQAERLDGTVLLAGCDKSIPGMLMAAARLDLASVFLYNGSIMPGVAKLTDGSEREVTIIDAFEAVGACARGLMSREDVDIIERAICPGEGACGGMYTANTMASAAEALGMSLPGSASPVAIDKRRDEYARKSGEAVVEMLRRGITARDILTKEAFENAIAVVMAFGGSTNAVLHLLAIAWEANVKLTLEDFTRVGQKVPHLADVKPFGRHVMKHVDEIGGVPVVMKALLDAGLLHGDCLTITGETMAENLAHIEPPDPDGKVLRAMNNPIHPTGGITILHGSLAPEGAVVKSAGFDSDVFEGTARVFERERAALDALEDGTITHGDVVVIRYEGPKGGPGMREMLAITGAIKGAGLGKDVLLMTDGRFSGGTTGLCVGHIAPEAVDGGPIAFVRDGDRIRLDVAKGTLDLLVDEAEFESRKAGFEPLPPVYTTGVLAKYTKLVGSAAVGAVCG

SEQ ID NO: 3 - DNA, 1770 bp, Mycobacterium gilvum
atgtggccgatgaatcgacgggcgcataatcaccccatgccctcagactcacgctcgcattctcttcgcgcaagcggctcatcggtcgacatcaaaccccgcagccgcgacgtgaccgacgggctcgagcgcaccgccgcgcgcggcatgctgcgcgcggtcggcatgaccgacgacgactgggtcaagccccagatcggggtcggctcgtcgtggaacgagatcacgccgtgcaacatgtcgctgcagcggctggcccaggcggtcaagggcggtgtgcacgaggccgggggttacccgctggagttcggcacgatctccgtctccgacggcatctcgatgggccacgagggcatgcacttctcgctggtgtcccgcgaggtcatcgccgacagcgtcgagaccgtggtgcaggccgaacgcctcgacggcacggtgttgctggccggctgcgacaagtcgatccccggcatgctgatggccgcggcccgcctcgatctggcgagcgtgttcttctacaacggctcgatcatgccgggcgtcgcgaagctcaccgacggaagcgagaaggaagtcacgatcatcgacgccttcgaggcggtcggtgcgtgtgcgcgcgggctgatgtcgcgggaggacgtcgacatcatcgagcgggccatctgccccggtgagggcgcctgcggtggcatgtacaccgccaacacgatggcctcggccgccgaggcgctcggcatgtcgctgccgggcagcgcgtctccggtggcgatcgacaagcggcgcgacgactttgcgcgccgctccggcgaggcggtggtcgagatgctgcgtcgcggcatcaccgcccgcgacatcctgaccaaggaggccttcgagaacgcgatcgccgtcgtgatggccttcggcggttccaccaacgcggtgctgcatctgctggccatcgcgtgggaggcgcaggtcgagctgacgctggcggacttcacccggatcgggcagaaggtgccgcacctggcggatgtgaagccgttcggcgcgtacgtgatgaagcacgtcgacgagatcggcggcgtgccggtggtgatgcgggcactgctcgacgccggactgctgcacggggactgcctcacggtgaccggtcagacgatggccgagaacctggcccacatcgagccgccggaccccgacggcaaggtgctgcgggcgatgaacaacccgatccacccgaccggcggcatcacgatcctgcacggatcgctggcccccgagggcgcggtggtcaagtcggccggcttcgactccgacgtgttcgagggcaccgcacgggttttcgagcgcgaacgggcggcgctcgacgcgctggaggacggcacgatcacccacggcgacgtcgtcgtcatccgttacgagggccccaagggcggcccggggatgcgcgagatgctggcgatcaccggtgcgatcaagggcgccgggctgggcaaggacgtgctgctgatgaccgacggacggttctcgggcgggacgacgggtctgtgcgtcgggcacatcgcgccggaggccgtcgacggcggaccgatcgcattcgtgcgtgacggggacaggatccggttggacgtcgccaacggcacgctggacatcctcgtcgacgaggccgagttcgaatcgcgcaaggcgggcttcgaaccgctgccgccggtctacacgacgggggtgctcgccaagtacacgaagctggtgggttcggcggcggtcggcgcggtctgcagttag

SEQ ID NO: 4 - protein, 589 aa, Mycobacterium gilvum
MWPMNRRAHNHPMPSDSRSHSLRASGSSVDIKPRSRDVTDGLERTAARGMLRAVGMTDDDWVKPQIGVGSSWNEITPCNMSLQRLAQAVKGGVHEAGGYPLEFGTISVSDGISMGHEGMHFSLVSREVIADSVETVVQAERLDGTVLLAGCDKSIPGMLMAAARLDLASVFFYNGSIMPGVAKLTDGSEKEVTIIDAFEAVGACARGLMSREDVDIIERAICPGEGACGGMYTANTMASAAEALGMSLPGSASPVAIDKRRDDFARRSGEAVVEMLRRGITARDILTKEAFENAIAVVMAFGGSTNAVLHLLAIAWEAQVELTLADFTRIGQKVPHLADVKPFGAYVMKHVDEIGGVPVVMRALLDAGLLHGDCLTVTGQTMAENLAHIEPPDPDGKVLRAMNNPIHPTGGITILHGSLAPEGAVVKSAGFDSDVFEGTARVFERERAALDALEDGTITHGDVVVIRYEGPKGGPGMREMLAITGAIKGAGLGKDVLLMTDGRFSGGTTGLCVGHIAPEAVDGGPIAFVRDGDRIRLDVANGTLDILVDEAEFESRKAGFEPLPPVYTTGVLAKYTKLVGSAAVGAVCS

SEQ ID NO: 5 - DNA, 1716 bp, Mycobacterium smegmatis
atgccctcagacgacaagtccactgagactcctgacatcaagccccgcagtcgcgacgtcaccgacggcctcgagaaggcggccgcccgtgggatgctccgtgcggtaggcatgggcgacgccgactgggccaagccgcagatcggcgtcgggtcgtcgtggaacgagatcacgccgtgcaacatgtcgctgcagcgcctcgcgaagtcggtcaaggacggcgtccacgaggcgggcggctacccgctcgaattcggcaccatctcggtgtccgacggcatctcgatgggccacgagggcatgcacttctcgctggtctcgcgcgaggtgatcgccgacagcgtcgagaccgtcgtgcaggccgagcgcctcgacggcacggtcctgctggccggctgcgacaagtccattccgggcatgctcatggctgccgcgcggctggacctcgcctcggtgttcttctacaacggctcgatcatgccgggtgtcgcgaagctgaccgacggcaccgagaaggaagtcacgatcatcgacgcgttcgaggccgtcggcgcgtgcgtgcgcggcctgatgtcgcgtgaggacgtcgacatcatcgagcgcgcgatctgccccggcgagggtgcctgcggcggcatgtacaccgccaacaccatggccagcgccgccgaggccctcggcctgtcgctgcccggcagcgcgtcgccggtcgccatcgacaagcgccgcgacgagttcgcgcgccgctccggcgaggccgtcgtcgacatgctgcgtcgcggcatcaccgctcgcgacatcctcaccaaggaggccttcgagaacgccatcgccgtggtcatggcgttcggcgggtccaccaacgccgtgctgcacctgctggcgatcgcccgcgaggccgaggtggagctgacgctcgacgatttcacgcgcgtcggcagcaaggtcccgcacctcgcggacgtcaagccgttcggccgccatgtcatgaagcacgtcgacgagatcggcggtgtgcccgtggtgatgcgcgctctgctggatgccggtctgctgaacggcgagtgcctgacggtcacgggcaagaccatggccgagaacctggcccacatcgctcccccggatcccgacggcaaggtgctgcgggccatgaacaacccgatccacccgaccggcggcatcacgatcctgcacggctcgctcgctcccgagggtgcggtggtcaagtcagccggcttcgattcggacgtgttcgagggcactgcaagggttttcgaccgcgaacgtgccgcgatggacgcgctcgaggacggcaccatccaggcgggcgacgtcgtggtgatccgctacgagggccccaagggcggtcccggtatgcgcgagatgctcgcgatcaccggcgccatcaagggtgcgggtctgggcaaggacgtgctgctgatgaccgacggtcggttctcgggcggtacgacgggtctgtgcgtcgggcacatcgcgccggaggccgtcgacggcggcccgatcgcgttcgtgcgcgacggtgaccgcatccgcctcgacgtcgccaagggcacgctcgacgtgctcgtcgacgaagaagagttcgaggcccgcaaggccggcttcgaacccctgccgccgcggtacaagaccggtgtgctggccaagtacaccaagctggtccagtccgccgccgtcggcgcagtctgcacctaa

SEQ ID NO: 6 - protein, 571 aa, Mycobacterium smegmatis
MPSDDKSTETPDIKPRSRDVTDGLEKAAARGMLRAVGMGDADWAKPQIGVGSSWNEITPCNMSLQRLAKSVKDGVHEAGGYPLEFGTISVSDGISMGHEGMHFSLVSREVIADSVETVVQAERLDGTVLLAGCDKSIPGMLMAAARLDLASVFFYNGSIMPGVAKLTDGTEKEVTIIDAFEAVGACVRGLMSREDVDIIERAICPGEGACGGMYTANTMASAAEALGLSLPGSASPVAIDKRRDEFARRSGEAVVDMLRRGITARDILTKEAFENAIAVVMAFGGSTNAVLHLLAIAREAEVELTLDDFTRVGSKVPHLADVKPFGRHVMKHVDEIGGVPVVMRALLDAGLLNGECLTVTGKTMAENLAHIAPPDPDGKVLRAMNNPIHPTGGITILHGSLAPEGAVVKSAGFDSDVFEGTARVFDRERAAMDALEDGTIQAGDVVVIRYEGPKGGPGMREMLAITGAIKGAGLGKDVLLMTDGRFSGGTTGLCVGHIAPEAVDGGPIAFVRDGDRIRLDVAKGTLDVLVDEEEFEARKAGFEPLPPRYKTGVLAKYTKLVQSAAVGAVCT

SEQ ID NO: 7 - DNA, 1698 bp, Mycobacterium vanbaalenii
atgccctcatcgccagacatcaagccccgtagccgcgacgtcaccgacggcctggagaaggccgccgcccggggaatgctgcgcgcggtaggcatgggcgacgaggacttcgccaaaccgcagatcggcgtcggctcgtcctggaacgagatcaccccgtgcaacctgtcgctggaccggctcgccaaggcggtcaaggaaggcgtcttcgaggccggcggcttcccgatggagttcggcaccatctcggtttccgacggcatctcgatgggccatgaaggcatgcacttttcgttggtgtcgcgcgagatcatcgccgacagcgtcgagacggtgatgcaggccgagcgtctggacggctcggtgctgctcgccggatgcgacaagtcgctgcccggcatgctgatggccgctgcgcggctcgacctggccagcgtttttctctacgccggctcgatcctgcccggccgggtcaagctgtccgacggcagcgagaaggacgtcacgatcatcgacgccttcgaggccgtcggcgcctgcgcgcgcgggctgatgccccgcgaggacgtcgacgccatcgagcgtgcgatctgcccgggtgaaggcgcctgcggcggcatgtacaccgccaacacgatggccagcgccgccgaggcgctcggcatgtcgctgcccggctccgccgccccgccggccaccgaccggcgccgcgacggcttcgcccgcaagagcggcatggccgtcgtcgaactgctgcgccgaggcatcaccgcccgcgacatcctgaccaaggaggcgttcgagaacgcgatcgcggtcgtgatggcgttcggcggctccaccaacgcggtgctgcacctgctcgcgatcgcctacgaggccaacgtcaagctgaccctggaggacttcacccgcgtcggcgccaaggtgccgcacctggccgacgtgaaaccgttcggcgcgtacgtgatgaacgacgtcgaccggatcggcggcgttccggtcgtgatgaaggctctgctggacgccggtctgctgcacggggactgcctcaccgtcaccggtaagacgatggccgagaaccttgcccacatcgccccgcccgaccccgacggcaaggtgctgcgcgctctcagcaggccgatccatcccaccggcggcatcacgatcctgcacggctcgctggctcccgaaggtgcggtggtgaagtccgccgggttcgactccgacgtgttcgaaggcaccgcaagggttttcgagcgtgaacgggcagcgctcgacgcgctggaggacggcaccatcacgcacggcgacgtcgtggtcatccgttacgagggccccaagggcggtccgggcatgcgcgaaatgctcgccatcacaggcgcaatcaagggcgccgggctcggcaaggatgtgctgttgatgaccgacggccggttctccggcggcaccaccggtctgtgcgtcggccacatcgccccggaagcggtcgacggcggacccatcgccttcatcaaggacggcgacaagatccgtctcgacgtggccaagggcaccctcgacgttgtggtcgacaaggacgaattcgaggcgcgcaaagtcgggttcgagccgcttccccccgtctacaccaccggggtgctggccaagtacaccaagctcgtcggctcggcggccaccggcgcggtctgcacgtag

SEQ ID NO: 8 - protein, 565 aa, Mycobacterium vanbaalenii
MPSSPDIKPRSRDVTDGLEKAAARGMLRAVGMGDEDFAKPQIGVGSSWNEITPCNLSLDRLAKAVKEGVFEAGGFPMEFGTISVSDGISMGHEGMHFSLVSREIIADSVETVMQAERLDGSVLLAGCDKSLPGMLMAAARLDLASVFLYAGSILPGRVKLSDGSEKDVTIIDAFEAVGACARGLMPREDVDAIERAICPGEGACGGMYTANTMASAAEALGMSLPGSAAPPATDRRRDGFARKSGMAVVELLRRGITARDILTKEAFENAIAVVMAFGGSTNAVLHLLAIAYEANVKLTLEDFTRVGAKVPHLADVKPFGAYVMNDVDRIGGVPVVMKALLDAGLLHGDCLTVTGKTMAENLAHIAPPDPDGKVLRALSRPIHPTGGITILHGSLAPEGAVVKSAGFDSDVFEGTARVFERERAALDALEDGTITHGDVVVIRYEGPKGGPGMREMLAITGAIKGAGLGKDVLLMTDGRFSGGTTGLCVGHIAPEAVDGGPIAFIKDGDKIRLDVAKGTLDVVVDKDEFEARKVGFEPLPPVYTTGVLAKYTKLVGSAATGAVCT

SEQ ID NO: 9 - DNA, 1707 bp, Nocardia farcinica
gtggccgagcagacgaacacccccgacctcaagccccgcagccgcgacgtcaccgacgggctggaacgcaccgccgcccgcggcatgctgcgcgcggtgggcatgggcgacgacgactgggagaagccgcagatcggcgtcgcctcctcctggaacgagatcaccccgtgcaacctgtcgctggaccggctcgcgcagggctgcaaggacggcgtgttcgccgccggtggcttcccgatgcagttcggcaccatctcggtctccgacggcatctcgatgggccacgagggcatgcacttctcgctggtgtcgcgcgaagtgatcgccgacagcgtggagacggtgatgcaggccgagcggctcgacggctcggtgctgctggccgggtgcgacaagtcgctgcccggcatgctgatggccgcggcccgcctcgacctggccagcgtgttcctctacgcgggctcgatcctgcccggcatcgccaagctctccgacggcaccgagcgcgaggtgacgatcatcgacgcgttcgaggcggtcggagcgtgcgcgcgcgggctgatgagccgggccgacgtcgacgccatcgaacgcgcgatctgtcccggcgagggcgcctgcggcggcatgtacaccgccaacacgatggccagcgcggccgaggcgctgggcatgtcgctgcccggcagcgccgcaccgcccgccaccgaccgccgccgcgacgggtacgcccgccgcagcggtcaggccgtggtcgagctgctgcgccgcggcatcaccgcccgcgacatcctcaccaaggaggcgttcgagaacgccatcgcggtggtgatggccttcggcggctcgaccaacgcggtgctgcacttgctcgcgatcgcgcacgaggcgcgggtggagctcaccctcgacgatttcgcgcgggtgggcaggcgggtgccgcacctggccgacgtcaagccgttcggcgcgcatgtgatgaccgatgtcgaccgcatcggcggcgtgccggtgatgatgaagaccctgctcgacgccgggctgctgcacggtgactgcctcaccgtcaccggccgcaccgtcgcggagaacctcgcccacatcgccccgcccgacccggacggcaaggtggtgcgcgcgctgaacgatccgatccatcccaccggcggcatcaccatcctgtccggctcgctggcgcccggcggggcggtggtgaaatccgccggtttcgacgaggacgtcttcaccggcacggccagggtcttcgatcgcgaacgcgccgcgatggacgcgctcgaggacggcaccatcaccgcaggcgacgtggtggtcatccgctacgagggccccaagggcggacccggcatgcgcgagatgctggccatcaccgccgccatcaagggcgcgggcctgggcaaggacgtgctgctgctcaccgacggccgcttctccggtggcaccaccggactgtgtgtcgggcacgtcgcgcccgaggcggtggacggtggtccgatcgcgttcgtccgcgacggcgaccgcatccggctcgacgtggccgcgggcaccctggacctgctggtggagcccgccgaactcgagcggcgcaaacaggactggcgaccgctgccgccgcgctacacccgcggcgtgctcgccaagtacaccaagctggtcggttcggcctcggtcggcgcggtctgcgactga

SEQ ID NO: 10 - protein, 568 aa, Nocardia farcinica
MAEQTNTPDLKPRSRDVTDGLERTAARGMLRAVGMGDDDWEKPQIGVASSWNEITPCNLSLDRLAQGCKDGVFAAGGFPMQFGTISVSDGISMGHEGMHFSLVSREVIADSVETVMQAERLDGSVLLAGCDKSLPGMLMAAARLDLASVFLYAGSILPGIAKLSDGTEREVTIIDAFEAVGACARGLMSRADVDAIERAICPGEGACGGMYTANTMASAAEALGMSLPGSAAPPATDRRRDGYARRSGQAVVELLRRGITARDILTKEAFENAIAVVMAFGGSTNAVLHLLAIAHEARVELTLDDFARVGRRVPHLADVKPFGAHVMTDVDRIGGVPVMMKTLLDAGLLHGDCLTVTGRTVAENLAHIAPPDPDGKVVRALNDPIHPTGGITILSGSLAPGGAVVKSAGFDEDVFTGTARVFDRERAAMDALEDGTITAGDVVVIRYEGPKGGPGMREMLAITAAIKGAGLGKDVLLLTDGRFSGGTTGLCVGHVAPEAVDGGPIAFVRDGDRIRLDVAAGTLDLLVEPAELERRKQDWRPLPPRYTRGVLAKYTKLVGSASVGAVCD

SEQ ID NO: 11 - DNA, 1695 bp, Rhodococcus sp.
atgagtaccccggatcccaaaccccgcagccgtgacgtcaccgacggattggagaagaccgcagcgcgcggaatgctccgtgcggtgggcatgggcgacgacgactgggggaaatcccagatcggcgtggcgtcgtcctggaacgagatcaccccctgcaacctgtcgctcgaccggctcgcgaaggccgtcaaggacggcgtccacgccgcaggcgggtatcccctcgagttcggcaccatctccgtgtccgacggcatctcgatgggacacgagggcatgcacttctccctcgtctcccgtgaggtgatcgccgacagcgtggaaacggtgatgcaggccgaacgcctcgacgggtcggtgctcctcgccggttgcgacaagtccctgcccggcatgctgatggccgcggcccgcctcgacctcgcgagcgtgttcctctacgccggttcgatcctgcccggtgtcgcaaaaatgtccgacggcaccgaacgcgacgtcaccatcatcgacgcgttcgaggcggtcggcgcctgttcgcgcggactgatgagccgtgaggacgtcgacgccatcgagcgtgccatctgtcccggcgagggcgcgtgcggcggaatgtacaccgcgaacacgatggccagtgccgccgaggcgctcggcatgtcgctgcccggcagcgcctccccgcccgccaccgaccgtcgtcgcgacggattcgcgaggcgcagcggtgaagccgtcgtcgaactgctccgccgcggcatcaccgccagggacatcctcaccaaggaagcgttcgagaacgccatcgccgtggtcatggccttcggcggttccaccaacgccgtcctgcacctgctggcgatcgcgagcgaagcggatgtggaactgaccctcgacgacttctcccgcgtcggcgcccgcgtcccgcacctcgcggacgtcaaaccgttcggcaagcacgtgatgaaggacgtcgaccacatcggcggcgtccccgtcatcatgaaggccctgctcgacgccgggatgctgcacggcgactgcctcaccgtcaccggcaagaccatggccgagaacctgtcggccatcgcccctcccgacccggacggcaaggtgctccgcgcgatgagttcgcccatccacccgaccggcggaatcacgatcctcaaggggtccctcgccccgggcggcgcggtggtgaagtcggccgggttcgactccgacgtcttcaccggcaccgcccgcgtcttcgaacgggaacgcgccgcgatggatgccctcgaggacggcaccatcacgaacggcgacgtcgtggtcatccgctacgagggccccaagggcggtcccggcatgcgcgagatgctcgcgatcaccggcgcgatcaagggcgccgggctgggcaaggacgtcctcctgctcaccgacggccgattctccggcggcaccaccggcctgtgcgtcggccacgtggcaccggaagccgtcgacggcggtcccatcgcgttcgtccgcgacggcgaccagatccgactggacgtcggaacgggcaccctcgaactgctcgtcgacgaagaggaactcgccggccgcaagaacgggtgggagcctctgcccccgcgctacacccgcggggtcctggccaagtacacgaagctcgtcggttccgcctcgggcggcgccgtctgcgggtag

SEQ ID NO: 12 - protein, 564 aa, Rhodococcus sp.
MSTPDPKPRSRDVTDGLEKTAARGMLRAVGMGDDDWGKSQIGVASSWNEITPCNLSLDRLAKAVKDGVHAAGGYPLEFGTISVSDGISMGHEGMHFSLVSREVIADSVETVMQAERLDGSVLLAGCDKSLPGMLMAAARLDLASVFLYAGSILPGVAKMSDGTERDVTIIDAFEAVGACSRGLMSREDVDAIERAICPGEGACGGMYTANTMASAAEALGMSLPGSASPPATDRRRDGFARRSGEAVVELLRRGITARDILTKEAFENAIAVVMAFGGSTNAVLHLLAIASEADVELTLDDFSRVGARVPHLADVKPFGKHVMKDVDHIGGVPVIMKALLDAGMLHGDCLTVTGKTMAENLSAIAPPDPDGKVLRAMSSPIHPTGGITILKGSLAPGGAVVKSAGFDSDVFTGTARVFERERAAMDALEDGTITNGDVVVIRYEGPKGGPGMREMLAITGAIKGAGLGKDVLLLTDGRFSGGTTGLCVGHVAPEAVDGGPIAFVRDGDQIRLDVGTGTLELLVDEEELAGRKNGWEPLPPRYTRGVLAKYTKLVGSASGGAVCG

SEQ ID NO: 13 - DNA, 1695 bp, Mycobacterium ulcerans
atgccagaagccgatatcaagccccgtagccgcgacgtcactgacggactggaaaaagccgctgcccgtggcatgttgcgggcggtaggcatggtcgacgaagacttcgccaaggcacagatcggggttgcctcgtcctggaacgagattacgccgtgcaacctctcgctggaccggctggccaagtcggtgaaagagggggtgttcgccgcgggcggctacccgcttgagttcggcacgatttcggtctccgacggcatttcgatgggtcacgagggcatgcacttctccctggtgtcgcgcgaagtgatcgccgacagcgtggaaaccgtgatgcaggccgagcgcctcgacggctcggtgctgctggccggatgcgacaaatccctgcccggaatgctgatggccgccgcccgtttggatttggcgtcggtgtttctctacgcgggctcgatccttccgggggtcgccaagctctccgacggcagcgaacgcgaggtcaccatcatcgacgcgttcgaagcggtcggcgcgtgctcgcgagggttgatgagccgagccgacgtcgacgccatcgagcgcgcgatctgccccggcgagggtgcctgtggcgggatgtacacggccaacacgatggccagtgccgctgaagcacttggcatgtcgctgccgggcagcgcggcgcccccggccaccgaccgccgccgcgacgggttcgcccggcaaagcggtcaagccgtcatcgaattgctgcgccagggcattaccgctcgcgacatcatgacccgggaggcgttcgagaacgccatcgcggtggtgatggcattcggcggctcgaccaatgcggtgctgcacctgctggcgatcgcccatgaggccaacgtcgagctcacgctcgacgacttcagccggatcggctcgaaggtgccgcacctagccgatgtcaagccgttcggccgccatgtgatgtcccacgtcgaccacatcggcggtgtgccggtggtcatgaagactttgctggatgccggcctgctgcacggggattgcctgaccgtgaccggccggaccgtggccgagaacctggaggccattgctccgccggacccggacggcaaggtgctacgcgcgctgatcaacccgatccatgcgaccgggggcatcaccatcctgcgtggatccctggcccccgaaggtgccgtggtcaagacggccggcttggacaccgatgtattcgaaggaacggcacgggttttcgacggcgagcgggccgcgctggatgccctcgaggacggcaccatcacccacggtgacgtggtggtgatccgttacgagggacccaagggcggccccgggatgcgggagatgctcgccatcaccggcgcgatcaagggcgccgggctcggcaaagacgtgctgctgttgaccgacggtcgattctccggcggcacaacgggcttctgtgtgggacacatcgcacccgaggcggtggatgccggaccgatcgcgttcgtgcgcgacggcgaccggatccggctcgacgttgccggccggacgctcgacgttctgaccgacccgccagagttcgcggcccgtcaacagaatttcactcctccggcgccgcgttacaagaccggcgtactggccaagtacgtcaagctggtcggctccgccgcgatcggcgcggtctgcggctaa

SEQ ID NO: 14 - protein, 564 aa, Mycobacterium ulcerans
MPEADIKPRSRDVTDGLEKAAARGMLRAVGMVDEDFAKAQIGVASSWNEITPCNLSLDRLAKSVKEGVFAAGGYPLEFGTISVSDGISMGHEGMHFSLVSREVIADSVETVMQAERLDGSVLLAGCDKSLPGMLMAAARLDLASVFLYAGSILPGVAKLSDGSEREVTIIDAFEAVGACSRGLMSRADVDAIERAICPGEGACGGMYTANTMASAAEALGMSLPGSAAPPATDRRRDGFARQSGQAVIELLRQGITARDIMTREAFENAIAVVMAFGGSTNAVLHLLAIAHEANVELTLDDFSRIGSKVPHLADVKPFGRHVMSHVDHIGGVPVVMKTLLDAGLLHGDCLTVTGRTVAENLEAIAPPDPDGKVLRALINPIHATGGITILRGSLAPEGAVVKTAGLDTDVFEGTARVFDGERAALDALEDGTITHGDVVVIRYEGPKGGPGMREMLAITGAIKGAGLGKDVLLLTDGRFSGGTTGFCVGHIAPEAVDAGPIAFVRDGDRIRLDVAGRTLDVLTDPPEFAARQQNFTPPAPRYKTGVLAKYVKLVGSAAIGAVCG

SEQ ID NO: 15 - DNA, 1728 bp, Mycobacterium avium
atgcccaccaccgattcggcgcgcgccgccgacatcaagcagcccgacatcaagccgcgcagtcgtgacgtcaccgacggcctggagaaggccgccgcccgggggatgctgcgggcggtaggcatgggcgacgaggacttcgccaagccgcagatcggggtggcgtcgtcctggaacgagatcacgccgtgcaacctgtcgctggaccggctggccaaggcggtcaaggaaggcgtcttcgccgcgggcggctacccgctggagttcggcaccatctcggtgtccgacggcatctcgatgggccacgagggcatgcacttctcgctggtgagccgcgaggtgatcgccgacagcgtcgagacggtgatgcaggccgagcgcctggacggctcggtgctgctggccggctgcgacaagtcgctgcccggcatgctgatggccgcggcccgcctggacctggcctcggtgttcctctacgccggctcgatcctgcccggggtggccaagctgtccgacggcagcgagcgcgaggtgacgatcatcgacgcgttcgaggccgtcggcgcgtgcgcgcgcgggctgatgccgcgcgaggacgtcgacgccatcgagcgggccatctgtcccggcgagggcgcctgcggcggcatgtacacggccaacaccatggccagcgccgccgaggcgctggggatgtcgctgccgggcagcgcggccccgccggccaccgaccgccgccgcgacggcttcgcccggcgcagcggccaggccgtcgtcgagctgctgcgccgcggcatcaccgcccgcgacatcctcaccaaggaggcgttcgagaacgcgatcgcggtggtgatggcgttcggcggctccaccaacgcggtgctgcacctgctggccatcgcccacgaggccgacgtggcgctgtcgctcgacgacttcagccggatcgggtcgaaggtgccgcacctggccgacgtcaagccgttcggccggcacgtgatgaccgacgtcgaccacatcggcggcgtgccggtgatgatgaaggcgctgctggacgccgggctgctgaacggcgactgcctgacggtgaccggtgcgacggtggcgcagaacctggccgcgatcgccccgcccgacccggacggcaaggtgctgcgggcactcagcgatccgttgcacccgaccggcggcatcaccatcctgcgcgggtcgctggcgcccgagggcgcggtggtcaagtccgccggcttcgattccgacgtgttcgaaggcaccgcaagggttttcgacggcgagcgggccgcgctggacgcgctggaggacggcaccatcaccaagggcgacgcggtggtgatccggtacgagggccccaagggcgggcccgggatgcgcgagatgctcgccatcaccggcgcgatcaagggcgccgggctgggtaaggacgtgctgttactcaccgacggccgcttctccggcgggacgacgggactgtgtgtcggccacatcgcgcccgaggcggtggacgcagggccgatcgcctttctgcgcgacggcgaccgcatccgcctggacgtcgccaaccgggttctggacgtactcgtcgatccggccgaattcgactctcggcgaacaggtttcaccccgccgccgccccgctacaagaccggggtgctggccaagtacgtcaagctcgtcggttccgcggcgatcggcgccgtctgcggctag

SEQ ID NO: 16 - protein, 575 aa, Mycobacterium avium
MPTTDSARAADIKQPDIKPRSRDVTDGLEKAAARGMLRAVGMGDEDFAKPQIGVASSWNEITPCNLSLDRLAKAVKEGVFAAGGYPLEFGTISVSDGISMGHEGMHFSLVSREVIADSVETVMQAERLDGSVLLAGCDKSLPGMLMAAARLDLASVFLYAGSILPGVAKLSDGSEREVTIIDAFEAVGACARGLMPREDVDAIERAICPGEGACGGMYTANTMASAAEALGMSLPGSAAPPATDRRRDGFARRSGQAVVELLRRGITARDILTKEAFENAIAVVMAFGGSTNAVLHLLAIAHEADVALSLDDFSRIGSKVPHLADVKPFGRHVMTDVDHIGGVPVMMKALLDAGLLNGDCLTVTGATVAQNLAAIAPPDPDGKVLRALSDPLHPTGGITILRGSLAPEGAVVKSAGFDSDVFEGTARVFDGERAALDALEDGTITKGDAVVIRYEGPKGGPGMREMLAITGAIKGAGLGKDVLLLTDGRFSGGTTGLCVGHIAPEAVDAGPIAFLRDGDRIRLDVANRVLDVLVDPAEFDSRRTGFTPPPPRYKTGVLAKYVKLVGSAAIGAVCG

SEQ ID NO: 17 - DNA, 1728 bp, Mycobacterium tuberculosis
atgccgcaaaccaccgacgaagccgcttccgtctcgacggtcgccgacatcaagccccgcagtcgagacgtcaccgacggcctggagaaggccgctgcccggggcatgttgagggcggtgggcatggacgacgaagacttcgcgaagccacagatcggggtcgcgtcgtcgtggaacgaaatcacgccgtgcaatctctcattggaccggctggccaacgcggtcaaggagggggtgttttcggccggcggctatccgcttgagttcggcacgatctcggtttcggacggcatctccatgggtcatgaggggatgcacttctcgctggtttcccgtgaggtgatcgccgacagcgtcgaagtcgtgatgcaggccgaacgactcgacggttcggtgctgctggccggatgcgacaaatcgctgcccggaatgctgatggccgccgcacgactggatctggcggcggtgttcctctacgcgggctctattttgcccggccgggccaagctctccgacggtagcgaacgagacgtcaccatcattgacgccttcgaggcggtcggagcgtgctctcgcggtttgatgagtcgcgccgacgtcgatgccatcgagcgggcaatctgccccggcgaaggggcatgcggcggcatgtacaccgctaacaccatggccagcgccgccgaggcgctcggcatgtcgttgccgggcagcgcggcaccgccggcgaccgaccgccggcgcgacgggttcgcgcgtcgcagcgggcaggccgtcgtcgagctgctgcgccgcggcatcaccgcccgcgacatcctcaccaaggaggcgttcgagaacgccatcgcggtgggaatggcgttcggcggctcgaccaacgcggtgctgcatctgctggccatcgcccacgaggccaacgtcgcactatcgcttcaggacttcagccggatcgggtcgggggtgccgcatttggccgatgtcaagccgttcggccgccatgtgatgtccgacgtcgatcacatcggcggtgtgccggtggttatgaaggcgctgctggacgccggtctgctacacggcgactgcctgacggttaccggtcacaccatggccgagaatctggctgccatcaccccgccggatccagatggcaaggtgctacgtgcgttggcaaacccgatccacccgagcggtggcatcaccatcctgcacggatcgctggcacccgaaggtgcggtggtcaagaccgccggattcgattccgacgtattcgaaggcaccgcaagagttttcgacggcgagcgcgctgcgctggacgcccttgaggatggcaccattaccgtgggcgacgccgtggtaatccggtacgaaggacccaagggcggccccgggatgcgcgaaatgctcgccatcacaggcgcgatcaaaggcgcaggactcggtaaagatgttctactgctgaccgacggccggttctccggtggaaccaccggcctgtgcgttggccacatcgcaccggaggcggtcgacggcggaccgatcgcacttctgcgcaacggcgaccggatccggctcgacgtggccggccgcgttctcgatgtgttggccgatccggccgaattcgcgtcccgacaacaggatttcagtcctccaccgccgcgctacactactggcgtactgtccaagtacgtcaagctggtcagctctgccgcggtcggcgcggtctgcggctag

SEQ ID NO: 18 - protein, 575 aa, Mycobacterium tuberculosis
MPQTTDEAASVSTVADIKPRSRDVTDGLEKAAARGMLRAVGMDDEDFAKPQIGVASSWNEITPCNLSLDRLANAVKEGVFSAGGYPLEFGTISVSDGISMGHEGMHFSLVSREVIADSVEVVMQAERLDGSVLLAGCDKSLPGMLMAAARLDLAAVFLYAGSILPGRAKLSDGSERDVTIIDAFEAVGACSRGLMSRADVDAIERAICPGEGACGGMYTANTMASAAEALGMSLPGSAAPPATDRRRDGFARRSGQAVVELLRRGITARDILTKEAFENAIAVGMAFGGSTNAVLHLLAIAHEANVALSLQDFSRIGSGVPHLADVKPFGRHVMSDVDHIGGVPVVMKALLDAGLLHGDCLTVTGHTMAENLAAITPPDPDGKVLRALANPIHPSGGITILHGSLAPEGAVVKTAGFDSDVFEGTARVFDGERAALDALEDGTITVGDAVVIRYEGPKGGPGMREMLAITGAIKGAGLGKDVLLLTDGRFSGGTTGLCVGHIAPEAVDGGPIALLRNGDRIRLDVAGRVLDVLADPAEFASRQQDFSPPPPRYTTGVLSKYVKLVSSAAVGAVCG

SEQ ID NO: 19 - DNA, 1695 bp, Mycobacterium lepraea
atgatgccccctgacatcaaaccccgcagccgcgacgttaccgatggcctggagaaggccgctgctcgtggcatgttgcgcgcagtcggcatgaacgatgacgacttcgccaaggcgcagatcggagttgcgtcatcatggaacgagatcacaccttgcaatctctcgctggaccgcctggccaaggcggtcaaggagggggtattctcggccggcggttatccgcttgagttcggaacaatttcggtttccgacggcatctcgatggggcaccaggggatgcacttctcgctggtgtcgcgcgaggttatagcggacagcgtcgaaaccgtaatgcaggccgagcgcctcgacggctcagtgcttttggctggctgcgataaatcactacccggaatgctgatggccgccgcacgtctcgacctcgcgtcggtatttctctacgccggctcgatcttgcccggacgaaccaagctctccgacggcaccgaacacgaagtcacgctcatcgacgcattcgaagcggtcggcgcgtgttctcgcggattaatgccccgcgctgatgtcgacgccatcgagcgggcgatctgccccggcgagggggcatgcggtggcatgtacactgccaacactatggccagcgcagcagaggcgctgggtatgtccttgccgggcagcgctgcgccgccggcaacagaccgtcgccgtgatggcttcgcgcggcgtagcgggcaggccgtcatcgaactgctgcgtcgcggtataaccgctcgcgacatccttaccaaggaagcgtttgagaacgcgatcgcggtggtgatggcgttcggtggctcgaccaacgcgatcctgcatctactggccattgcccatgaggccgacgtcaccttgtcgctcgaggacttcagtcggatcggatttaaggtgccgcatatagccgacgttaagccgttcggccggcacgtgatgttcgacgtcgaccacatcggtggtgtgccggtggtaatgaaagcacttctggacgcaggtctactgcacggtgattgcctgacggtgaccggtcagacgatggccgagaacctagcctccattgccccgccagacccggatggccaggtgatccgcacgttgcataatccaattcatccgacgggaggcattacgatcctgcgtggatcgttggcacctgatggcgcggtggttaagacggctggactcgactccgatgtgttcgaaggaactgcaagggttttcgacggagaacgggccgcgttggacgcactcaaggacggcaccatcgccaaaggcgatgttgtggttatccgctatgaaggcccgaaaggcggcccggggatgcgcgaaatgctagccatcaccggtgccatcaaaggtgccgggctaggcaaagatgttctgctacttactgacggcaggttctctggcggaacgaccggcttttgcgtaggacacatcgcgccggaagctgtcgaagcgggaccaatcgcattcctgcgtgacggcgaccgggtcctgctagacgttgtcggctgctccctcgatgtgctggtcgatccagtcgaattttcctctcggaaaaaggatttcattcctcctgcgccacgctacaccaccggtgtgcttgccaagtacgtcaagctcgtcagttcggcgacggtcggcgcggtctgcggttag

SEQ ID NO: 20 - protein, 564 aa, Mycobacterium lepraea
MMPPDIKPRSRDVTDGLEKAAARGMLRAVGMNDDDFAKAQIGVASSWNEITPCNLSLDRLAKAVKEGVFSAGGYPLEFGTISVSDGISMGHQGMHFSLVSREVIADSVETVMQAERLDGSVLLAGCDKSLPGMLMAAARLDLASVFLYAGSILPGRTKLSDGTEHEVTLIDAFEAVGACSRGLMPRADVDAIERAICPGEGACGGMYTANTMASAAEALGMSLPGSAAPPATDRRRDGFARRSGQAVIELLRRGITARDILTKEAFENAIAVVMAFGGSTNAILHLLAIAHEADVTLSLEDFSRIGFKVPHIADVKPFGRHVMFDVDHIGGVPVVMKALLDAGLLHGDCLTVTGQTMAENLASIAPPDPDGQVIRTLHNPIHPTGGITILRGSLAPDGAVVKTAGLDSDVFEGTARVFDGERAALDALKDGTIAKGDVVVIRYEGPKGGPGMREMLAITGAIKGAGLGKDVLLLTDGRFSGGTTGFCVGHIAPEAVEAGPIAFLRDGDRVLLDVVGCSLDVLVDPVEFSSRKKDFIPPAPRYTTGVLAKYVKLVSSATVGAVCG

SEQ ID NO: 21 - DNA, 1692 bp, Kineococcus radiotolerans
gtgagcgtcgacatcaagccccgcagtcgccaggtcaccgacggtctggaggcgaccgcctcgcgcggcatgctccgcgccgtcggcatgggcgacgacgactgggagaagccccagatcggggtggcctccagctggaacgagatcaccccctgcaacctgtccctggaccgcctcgcgaaggccgtcaaggacggcgtgcactccgcccacggcttcccgatggagttcggcaccatctccgtctccgacggcatctcgatgggccacgaggggatgcactactccctcgtctcgcgcgaggtcatcgccgactccgtcgagaccgtcatgagcgccgagcgcctcgacgggtccgtcctgctcgccggctgcgacaagtccctgccggggatgctcatggccgccgcgcgcctggacctggccagcgtcttcctctacgccggcacgatcctgcccgggcgggccaagctgtccgacggcagcgagcacgaggtcaccctcatcgacgccttcgaggccgtcggggcgtgcgcgcgggggctgatgtcccgcgaggacgtcgacgtcatcgagcgcgccatctgccccggcgagggggcctgcgggggcatgtacaccgcgaacacgatggccgccgcggccgaggcgctggggatgtccctgcccggcagcgcggccccgcccgcgaccgaccgccgtcgcgacgggttcgcccgccgctccggcgaggccgtggtgaacctgctctcgaagggcatcaccgcccggcagatcctcaccaaggaggcgttcgagaacgccatcgccgtcgtcatggccctgggcggctccaccaacgccgtcctgcacctgctggccatcgcctacgaggccgaggtcgacctcaccctcgccgacttcgaccgcgtcgccgcgaaggtcccgcacctggccgacctcaagcccttcggccgccacgtcatggtcgacgtcgaccgcatcggcggcatccccgtcgtcatgcgcgcgctgctggacgcgggcctgctgcacggggactgcctgacggtgaccgggaggacgatggccgagaacctcgccgacatcgccccgcccgacgtcgacggcgtcgtgctgcgctcgctgcaggaccccatccacaagaccggcggcatcacgatcctctccggcaacctcgcccccggcggcgcggtggtgaagagcgcgggcttcgactccgacgtcttcgagggcaccgcgcgggtcttcgagcgcgagcgcgccgccctggacgccctggaggacggcacgatctccgccggcgacgtcgtcgtcatccgctacgagggccccaagggcggcccggggatgcgcgagatgctcgccatcaccggcgcgatcaagggcgcgggcctgggcaaggacgtgctgctcatgaccgacgggcgcttctccggcgggacgacgggcctgtgcgtggggcacgtggcccccgaggccgtcgacgccggtcccatcgcgttcgtgcgcgacggggaccggatccgcctggacgtcgccggcaagaccctcgaggtgctggtggacgaggaggagctcgccgcccgccgcgagggctgggagccgctgcccccggtcttcaagcgcggggtgctggccaagtacgccaagcaggtccagtccgcctcgctcggggccgtctgccgctga

SEQ ID NO: 22 - protein, 563 aa, Kineococcus radiotolerans
MSVDIKPRSRQVTDGLEATASRGMLRAVGMGDDDWEKPQIGVASSWNEITPCNLSLDRLAKAVKDGVHSAHGFPMEFGTISVSDGISMGHEGMHYSLVSREVIADSVETVMSAERLDGSVLLAGCDKSLPGMLMAAARLDLASVFLYAGTILPGRAKLSDGSEHEVTLIDAFEAVGACARGLMSREDVDVIERAICPGEGACGGMYTANTMAAAAEALGMSLPGSAAPPATDRRRDGFARRSGEAVVNLLSKGITARQILTKEAFENAIAVVMALGGSTNAVLHLLAIAYEAEVDLTLADFDRVAAKVPHLADLKPFGRHVMVDVDRIGGIPVVMRALLDAGLLHGDCLTVTGRTMAENLADIAPPDVDGVVLRSLQDPIHKTGGITILSGNLAPGGAVVKSAGFDSDVFEGTARVFERERAALDALEDGTISAGDVVVIRYEGPKGGPGMREMLAITGAIKGAGLGKDVLLMTDGRFSGGTTGLCVGHVAPEAVDAGPIAFVRDGDRIRLDVAGKTLEVLVDEEELAARREGWEPLPPVFKRGVLAKYAKQVQSASLGAVCR

SEQ ID NO: 23 - DNA, 1704 bp, Janibacter sp.
atgagcaagcccgacatcgacatcaagccccgtagccgcgacgtcaccgacggtctcgagaagaccgcggcccgaggaatgctccgtgccgtaggcatgggcgacgacgactgggtcaagccacagatcggtgtcgcgagctcctggaacgagatcaccccctgcaacctctctctcgaccgcctgtccaaggcagtcaaggacggcgtccacgctgccggtggctacccgctcgagttcggcacgatctcggtgtccgacggcatctcgatgggccacgagggcatgcacttctcgctcgtgtcgcgcgagatcatcgccgactccgtcgagaccgtcatgagtgccgagcgcctcgacggctcggtcctgctcgccggctgcgacaagtccctcccgggcatgctcatggctgcggcgcgcctcgacctcgcctcggtcttcctgtatgccgggtcgatccttcccgggatcgcgaagctctcggacggcaccgagaaggaggtcacgatcatcgacgccttcgaggccgtcggtgcagccaacgcgggcaagatgtcgctggccgacgtcgacgccatcgagcgcgcgatctgtccgggggagggcgcctgtggcggtttctacacggccaacaccatggctgcggtcgccgagtcgatcggcatgtccatcccgggttcggccgccccgccagccaccgaccgacgccgcgacgtgcacgcccgccgctccggtgaggccgtcgtcgagctcctgcgtcgcggcatcaccgcccgccagatcatgaccaagcccgcgttcgagaacgccatcgccgtcgtcatggccttcggtggctcgaccaacgccgtcctccacctgctcgccatggcccacgaggccgaggtcgacctcaccatcggcgacttccagcgcatcggcaaaaaggtcccgcacctcgccgacgtcaagccgttcggcgccttcgtcatgaaggacatcgaccacatcggtggcatccccgtcgtcatgaagtcgctgctcgaggccgacctcctcgatggcgacgcactcaccgtgaccggcaagaccgtcgccgagaacctcgacgagatcaagccgccgcacatcgacggtcgcgtgatccgcgagttcagcaacccgatccacaagaccgggggcctcaccatcctcaccggctccctcgcgcccgaaggtgcggtcgtgaagtcggccggattcgacaccgaggtcttcgagggcagcgcccgcgtcttcaacggcgagcgtgccgcgatggatgccgtcgagcagggtgccctcaagccccaggacgtcgtcgtcatccgctacgaagggcccaagggtggcccgggaatgcgcgagatgctcgccgtcaccggcgccatcaagggcgcgggtctcggcaaggacgtcctcctcctcaccgacggtcgcttctccggtggcacgaccggcctctgcgtcggacacgtggcccccgaggccgtcgacgagggccccatcgccttcgtccgtgacggagacggcatccgcctcgacgtcgcgaacggcactcttgacctcctcgtcgacgacgccgagctcgagcgccgccgcaccgagggcgtcacccatcccgagcccaagtacacccgcggcgtgctcgcgaagtaccgcaagctcgtcggctcggccagcaagggcgccgtctgcgactga

SEQ ID NO: 24 - protein, 567 aa, Janibacter sp.
MSKPDIDIKPRSRDVTDGLEKTAARGMLRAVGMGDDDWVKPQIGVASSWNEITPCNLSLDRLSKAVKDGVHAAGGYPLEFGTISVSDGISMGHEGMHFSLVSREIIADSVETVMSAERLDGSVLLAGCDKSLPGMLMAAARLDLASVFLYAGSILPGIAKLSDGTEKEVTIIDAFEAVGAANAGKMSLADVDAIERAICPGEGACGGFYTANTMAAVAESIGMSIPGSAAPPATDRRRDVHARRSGEAVVELLRRGITARQIMTKPAFENAIAVVMAFGGSTNAVLHLLAMAHEAEVDLTIGDFQRIGKKVPHLADVKPFGAFVMKDIDHIGGIPVVMKSLLEADLLDGDALTVTGKTVAENLDEIKPPHIDGRVIREFSNPIHKTGGLTILTGSLAPEGAVVKSAGFDTEVFEGSARVFNGERAAMDAVEQGALKPQDVVVIRYEGPKGGPGMREMLAVTGAIKGAGLGKDVLLLTDGRFSGGTTGLCVGHVAPEAVDEGPIAFVRDGDGIRLDVANGTLDLLVDDAELERRRTEGVTHPEPKYTRGVLAKYRKLVGSASKGAVCD

SEQ ID NO: 25 - DNA, 1704 bp, Nocardioides sp.
atgaccgagcccacctcccgccccgacatcaagccccgctcccgcgacgtcaccgacggcctggagaaggccgccgcgcgcggcatgctgcgggcggtaggcatgggcgacgaggacttcgcgaagccgcagatcggcgtgggctcgagctggaacgagatcaccccgtgcaacctgtccctggaccggctcgccaaggccgtgaagaacggcgtgcacgcggccggcggctacccgctggagttcggcaccatctcggtctccgacggcatctccatgggccacgagggcatgcacttctcgctggtctcccgcgaggtgatcgccgactcggtcgagaccgtgatgatggccgagcgcctggacggctcggtgctgctcgccggctgcgacaagtcgctgccgggcatgatgatggccgccgcccgcctcgacctggccagcgtgttcctctacgccggctcgacgatgcccgggcaggtggacggcaacgacgtcacgatcatcgacgcgttcgaggccgtcggggcgtgcctggccggcaagatcagccgcgacgaggtggaccggatcgagcgggccatctgtccgggcgagggcgcctgcggcggcatgtacaccgcgaacacgatggcctccatcgccgaggcgatcggcatgtcgctccccggctcggcggccccgccggcggtcgatcgccgacgcgacggcttcgcgcaccgctcgggggaggccgtggtcaacctgttgcgccagggcatcacggcccgccagatcatgactcgcgcggcgttcgagaacgcgatcacggtcgcgatggcgctcggcggctcgaccaacgccgtgctccacctgctcgcgatggctcgtgaggccgacgtcgacctcaccatcgacgacttcaaccggatcggtgacaaggtgccgcacctcggcgacctcaaaccgttcggcaagtacgtcatgaacgacgtcgacaagatcggcggcatccccgtcgtgatgaaggcactgctcgacgccggtctgatgcacggcgacgcgctcaccgtcaccggcaagaccctggccgagaacctcgccgagctggccccgccggagctcgatgacgaggtgatccgcaagctggaccggccgatccacaagaccggtgggctcacgatcctcaagggctcgctcgctcccgagggcgccgtggtcaagacggccggcttcgacgactccgtgttcaccggcaccgcccgcgtcttcgacggcgagcgggccgcgatggacgccctcgaggccgggcagatccagccccgcgacgtcgtggtgatccgctacgagggcccgaagggtggccccggcatgcgcgagatgctcgcgatcaccggcgcgatcaagggcgccggcctcggcaaggacgtcttgctgatcaccgacggcaggttctccggtggtacgacgggcctgtgcgtgggccacatcgcccccgaggccgtcgacggcggcccgatcgcgttcgtccgcgacggcgaccagatcaccctcgacgtcgccaaccggctgctcgaggtggaggtcgtcggtcccgatgccgaggccgagtgggagcgccgcaaggtcggctgggagccgaatccgcccaagtacacccgcggggtgctcggcaagtacgccaagatcgtccagtccgccgcgcacggcgccatcaccggctga

SEQ ID NO: 26 - protein, 567 aa, Nocardioides sp.
MTEPTSRPDIKPRSRDVTDGLEKAAARGMLRAVGMGDEDFAKPQIGVGSSWNEITPCNLSLDRLAKAVKNGVHAAGGYPLEFGTISVSDGISMGHEGMHFSLVSREVIADSVETVMMAERLDGSVLLAGCDKSLPGMMMAAARLDLASVFLYAGSTMPGQVDGNDVTIIDAFEAVGACLAGKISRDEVDRIERAICPGEGACGGMYTANTMASIAEAIGMSLPGSAAPPAVDRRRDGFAHRSGEAVVNLLRQGITARQIMTRAAFENAITVAMALGGSTNAVLHLLAMAREADVDLTIDDFNRIGDKVPHLGDLKPFGKYVMNDVDKIGGIPVVMKALLDAGLMHGDALTVTGKTLAENLAELAPPELDDEVIRKLDRPIHKTGGLTILKGSLAPEGAVVKTAGFDDSVFTGTARVFDGERAAMDALEAGQIQPRDVVVIRYEGPKGGPGMREMLAITGAIKGAGLGKDVLLITDGRFSGGTTGLCVGHIAPEAVDGGPIAFVRDGDQITLDVANRLLEVEVVGPDAEAEWERRKVGWEPNPPKYTRGVLGKYAKIVQSAAHGAITG

SEQ ID NO: 27 - DNA, 1722 bp, Renibacterium salmoninarum
atgagtgtggaaaccagtagcgaaaccggcaacaaaccagatatcaaaccgagaagccgcattgtcaccgacggaattgccgccgcgcctgctcgaggaatgctccgagccgttggctttggcgacgaggactttgcgaagccgcagattggcgtcgcgagttcgtggaacgaaattaccccctgcaatctctcccttgatcggctggccaaagccgtcaaagagggcgtgcatgccggcggcggcttcccgatgatctttggcacaatttcggtgtccgatggcatttcgatggggcacgaaggtatgcacttctcgcttgtctcccgcgaagtgattgctgactcggtagagactgttatgcaagcagaacgcatcgatggctcggtgctgcttgctggctgcgataagtcattgccgggcatgttgatggccgcagcccggctcaatgtgtccagtgttttcctctacgccggctcaatcatgcccggctgggtcaagcttgaagacggcacagagaaagacgtcacgcttattgacgcctttgaagctgtcggtgcctgcgcagccggcaaaatgtcggtgggggatctagaccgaatcgaacgggcaatttgtccgggcgaaggtgcctgcggtggtatgtacaccgcgaacactatggcctgtattggcgaggccttgggtatgtccttgcctggctcggctgcgccgccaagtgcggaccgccgtcgcgatatgttcgcgcaccgttctggcgaggctgttgttgagttgctccgccggggcattcgctcgcgcgacatcatgaccaaggaagcctttgagaacgcgattgcggtcacgatggcttttggcggctccacgaacgcagtgctgcacctacttgctattgctcgtgaggccgaggttgatctgcagcttgaggacttcaaccgaattggtgacaagatcccgcacctcggcgacctcaagccttttggccgatacgtgatgaacgacgtcgaccgggtgggcggcgtgccggtgataatgcgcgcgctgctcgatgccgggctactgcatggtgatgccttgaccgtgaccggtaagactctggccgaaaatcttgaagcgatcaatccgccagatctggatggcaagattttgcgtgcgttggataatccaatccacaaaactggtgggttgagtgtgctcaagggctcgcttgcacctggcggcgccgtggttaagaccgccgggttcgacgccgaggttttcgaaggcccggctcgggtttttgaacgcgaacaaggcgcactcgaagcgcttaaggctggcgaaatcaaagcgggcgacgtcgtcgtgatccgctatgaaggccctaaaggtgggccgggtatgcgcgaaatgctcgccatcactggcgcgatcaagggcgctggcctgggcaaagacgtgttgttgttgaccgacggtcggttctccggaggtacaacgggtctgtgcatcgggcacgtggcgccggaagctgtcgacgccgggccaatcgcctttgtgcaagacggcgacctaatccgggttgatatccccaacaagagtttcgatctcttggttgacgaagcagagctggaagctcggaaaatcggttgggagccgttgcctgctcgcttcactaaaggcgtgttggctaagtacgctaagcttgtgcactcggcttccgaaggcgcatactgcggctaa

SEQ ID NO: 28 - protein, 573 aa, Renibacterium salmoninarum
MSVETSSETGNKPDIKPRSRIVTDGIAAAPARGMLRAVGFGDEDFAKPQIGVASSWNEITPCNLSLDRLAKAVKEGVHAGGGFPMIFGTISVSDGISMGHEGMHFSLVSREVIADSVETVMQAERIDGSVLLAGCDKSLPGMLMAAARLNVSSVFLYAGSIMPGWVKLEDGTEKDVTLIDAFEAVGACAAGKMSVGDLDRIERAICPGEGACGGMYTANTMACIGEALGMSLPGSAAPPSADRRRDMFAHRSGEAVVELLRRGIRSRDIMTKEAFENAIAVTMAFGGSTNAVLHLLAIAREAEVDLQLEDFNRIGDKIPHLGDLKPFGRYVMNDVDRVGGVPVIMRALLDAGLLHGDALTVTGKTLAENLEAINPPDLDGKILRALDNPIHKTGGLSVLKGSLAPGGAVVKTAGFDAEVFEGPARVFEREQGALEALKAGEIKAGDVVVIRYEGPKGGPGMREMLAITGAIKGAGLGKDVLLLTDGRFSGGTTGLCIGHVAPEAVDAGPIAFVQDGDLIRVDIPNKSFDLLVDEAELEARKIGWEPLPARFTKGVLAKYAKLVHSASEGAYCG

SEQ ID NO: 29 - DNA, 1767 bp, Arthrobacter aurescens
gtgcaacagcgtcggcagtcgcccggtagacatagactttggaccatgagtgacaccacccagattgcgacagacagcacgccggacattaaaccccgcagccgggtggtgacagacggcattcacgcggcgcctgcccgcggcatgttccgtgcggtgggcatgggcgacgacgactttgccaaaccccaaatcggtgttgccagctcgtggaatgaaattaccccttgcaatctttccctgaatcgcctcgcacaaggcgccaaggaaggcgtccatgccggcggcggcttcccgatgcagttcggcacgatctccgtttcggatggtatttccatgggccacgagggcatgcacttctccctggtctcccgcgaagtcatcgccgactctgtggaaacagtgatgcaggccgagcgcattgacggctcggtgctcctggccggctgtgacaagtcccttccgggcatgctcatggctgctgcccgcttggacctcgcatccgtcttcctctacgccggctccatcatgccgggctgggtcaagctggaggacggctcggagaaggaagtcaccctcattgatgccttcgaggccgtgggtgcctgcgccgccggcaaaatgagcatggaagacctcacaaggatcgaaaaggccatctgtcccggcgaaggcgcctgcggcggtatgtacacggccaacaccatggcgtgcatcggcgaggccttgggcatgtccctcccgggttcagccgccccgccgtcggcagaccgccgtcgtgatgatttcgcacgcaagtccggcgaagccgtagtaaacctgctgcgcctgggcatcacggcccgcgacatcatgaccaaaaaggcgttcgagaatgccattgccgtcaccatggccttcggcggttccaccaacgccgtgctgcacttgctcgcgatcgcccgggaagccgaagtagagctgacgctggacgacttcaatcgcatcggcgacaaaattccgcaccttggggacctcaagcccttcggccgttatgtgatgaccgacgttgacaagatcggcggcgtgccggtcatcatgaaggcactgctcgacgccggactactgcacggcgactgcctcaccgttaccggcaagacgctcgcggaaaacctcgcctcgatcaacccgccggaccttgacggcaaaatcctccgtgcgctggacaacccgatccacaagaccggtggcatcaccatcctccacggctctatggctccggaaggagcggtagtgaagagtgccggttttgatgctgacgtctttgaaggaactgcacgcgttttcgaacgcgagcagggcgccctcagcgcgttggacaacggcgaaatcaacaagggagacgtagtggtcatccgctatgaaggccccaagggcggtcccggcatgcgggaaatgttggccatcaccggcgccatcaagggagcgggactcggcaaggatgtcctccttctcacggatggccggttctcgggtggcacaacgggtctgtgcatcggccacgttgcgcctgaagccgtggatggtggccccatcgcgttcgtgaaggacggtgaccgcatccgtgtagacatcgccgctcgctccttcgacctcctggtggacgaagccgagctcgaagcccgcaaagagggctggaagccactgcccgccaagttcaccaagggtgttcttgccaagtacgccaagcttgtccacagcgcctccaccggagcgtactgcggataa

SEQ ID NO: 30 - protein, 588 aa, Arthrobacter aurescens
MQQRRQSPGRHRLWTMSDTTQIATDSTPDIKPRSRVVTDGIHAAPARGMFRAVGMGDDDFAKPQIGVASSWNEITPCNLSLNRLAQGAKEGVHAGGGFPMQFGTISVSDGISMGHEGMHFSLVSREVIADSVETVMQAERIDGSVLLAGCDKSLPGMLMAAARLDLASVFLYAGSIMPGWVKLEDGSEKEVTLIDAFEAVGACAAGKMSMEDLTRIEKAICPGEGACGGMYTANTMACIGEALGMSLPGSAAPPSADRRRDDFARKSGEAVVNLLRLGITARDIMTKKAFENAIAVTMAFGGSTNAVLHLLAIAREAEVELTLDDFNRIGDKIPHLGDLKPFGRYVMTDVDKIGGVPVIMKALLDAGLLHGDCLTVTGKTLAENLASINPPDLDGKILRALDNPIHKTGGITILHGSMAPEGAVVKSAGFDADVFEGTARVFEREQGALSALDNGEINKGDVVVIRYEGPKGGPGMREMLAITGAIKGAGLGKDVLLLTDGRFSGGTTGLCIGHVAPEAVDGGPIAFVKDGDRIRVDIAARSFDLLVDEAELEARKEGWKPLPAKFTKGVLAKYAKLVHSASTGAYCG

SEQ ID NO: 31 - DNA, 1695 bp, Leifsonia xyli
atgcctcagatcgattggaaaccgcgttcgcgcgttgtcacggacgggatcgaagccaccacgagccgcgggatgctccgtgcggtcggcatgggggacgccgactgggagaagccgcagatcggcatcgcctcgtcctggaacgagatcacgccgtgcaacctctcgctcgaccggctggcccagggcgccaaagaaggcgtccactccggtggcggttatccgctgcaattcggtaccgtctcggtctccgacggtatctcgatggggcacgagggaatgcacttctcgctcgtctcccgtgaggtcatcgccgactcggtcgagacggtcatgatggccgagcggctcgacggcaccgtcctcctcgccggctgcgacaaatcgctgccgggcatgctgatggccgcggcccgtctcgacctctccgcgatcttcctctacgcgggctccatcgcgcccggctgggtcaaactcagcgacggcaccgagaaggacgtcacgatcatcgactcgttcgaggctgtcggtgcgtgcaaggccggcaagatgagcgaggaggacctcaaacgcatcgagtgcgccatagccccgggtgaaggagcctgcggcggcatgtacaccgcgaacaccatggcgtccgtcgccgaggcactcgggatgagcctgcccggctcggctgcgccgccctcggccgaccggcggcgcgactccttcgcccaccgctccggcgaggctgttgtctccctgctgaagcagggcatcacggctcgcgacatcctcaccaagaaggcgttcgagaacgccatcgcggtggcgatggccttcggcgggtcgacgaacgtcgtgcttcacctgctcgccatcgcgcgcgaggccgaggttgacctcaccatcgacgatttcaaccgcatcggcgagacggttccgcacatcggcgatctcaaaccgttcggcacgtacgtcatgaacgacgtcgaccgtcacggtggtgtcccggtcgtcatgaaggcgctcctggacgcgggcctgctgcacggggactgcctcaccgtgaccggcaagaccgtcgcggagaacctggcggagatcgacccgcccgcaccggacggcaccgtcctgcgctcgctggacaaccccatccacccgacaggggggctcacaatcctcaagggcacgctcgctccggagggcgccgttgtcaagacggctggtttcgacgccgaggtgttcgagggcccagcgcgcgtgttcgagcgcgagcgcgccgctatggacgctctcaccgcgggccggatcaacgccggcgatgtggtcgtcatctgctacgaagggccgaagggcggtcccgggatgcgcgagatgctcgcgatcaccgccaccatcaagggtgcaggcctcggcaaggatgtactactcttgacggacgggcgattctcaggcggcacaaccggcctgtgcatcggccacatagcacccgaagcggtggacgctggtcccatcgcattcgtgcgcgatggtgatttgatacgggtcgatatcgcggctcgctccctcgacctactggtcgacgagtcagagctgaccgcccgccgggacggctgggcgcctcttcctccgcgctatacccgtggcgttctcgcgaagtactccaagctcgttcgctccgctgcggagggtgcggtcaccgggtag

SEQ ID NO: 32 - protein, 564 aa, Leifsonia xyli
MPQIDWKPRSRVVTDGIEATTSRGMLRAVGMGDADWEKPQIGIASSWNEITPCNLSLDRLAQGAKEGVHSGGGYPLQFGTVSVSDGISMGHEGMHFSLVSREVIADSVETVMMAERLDGTVLLAGCDKSLPGMLMAAARLDLSAIFLYAGSIAPGWVKLSDGTEKDVTIIDSFEAVGACKAGKMSEEDLKRIECAIAPGEGACGGMYTANTMASVAEALGMSLPGSAAPPSADRRRDSFAHRSGEAVVSLLKQGITARDILTKKAFENAIAVAMAFGGSTNVVLHLLAIAREAEVDLTIDDFNRIGETVPHIGDLKPFGTYVMNDVDRHGGVPVVMKALLDAGLLHGDCLTVTGKTVAENLAEIDPPAPDGTVLRSLDNPIHPTGGLTILKGTLAPEGAVVKTAGFDAEVFEGPARVFERERAAMDALTAGRINAGDVVVICYEGPKGGPGMREMLAITATIKGAGLGKDVLLLTDGRFSGGTTGLCIGHIAPEAVDAGPIAFVRDGDLIRVDIAARSLDLLVDESELTARRDGWAPLPPRYTRGVLAKYSKLVRSAAEGAVTG

SEQ ID NO: 33 - DNA, 1704 bp, Marine actinobacterium
atgtctgagagtgattcgattgatatcaagccacgttcccgcacggtaaccgacggaattgaagcaacaacttcgcgcggaatgctgcgtgcagttggtatgggagatgccgactgggagaagccccagatcggtattgcgagctcgtggaacgagatcaccccctgcaatctgtcgctcgatcgcctcgctcaagcggcgaaagagggagtgcacgccggtggcgggtacccactgcagtttggaacgattagcgtttccgatggcatttcaatggggcacgaggggatgcacttctcactcgtgagtcgcgaagttatcgctgactccgttgaggttgtcatggaggcagagcgcctcgacggttcggtcacgctcgcgggctgcgacaagtcgcttcccggaatgctgatggctgcggcgcggctcaacctcgcctctgtcttcctctatgccggttcgatcgctcccggctgggtcaagctcagcgacggtaccgaaaaagacatcacgatcatcgactcgttcgaagcagtcggcgcagtcaaagctggccggatgagcgaagccgacgccaagcgcatcgagtgtgcttttgcgcccggcgagggtgcctgtggcggtatgtacacggccaacacgatggcgagcgttgcggaagccctgggaatgagtcttcccggctcggcgagcccagcatccgccgatcgtcgtcgcgactacttcgcgcaccgttcaggcgaagctgtcgtcaatcttctgcgcctcggtatcacttcgcgcgacatcatgacgaagaaggcttttgagaacgcgatcacggtagcaatggctcttggtggctccacgaacgttgtgctgcacatcctcgccatcgcgagcgaagccgaagttgaactcacgctcgatgacttcaatcgcatcggcgacaaggttccccacttgggcgacctgaagccgttcggccagtacgtcatgaacgatgttgaccgccacggcgggctcccggtgctcatgaaggcgctcatggaggaggggctcattcacggcgatgccctcacagtgacgggcaagactgttgccgaaaacttggccgagatggacatcgatcctctagatggcaaggttcttcgcaagttcgacaaccccatccaccccactgggggtctcacaattcttaagggttctttcgctcccgagggtgcagtcgtgaagacggcaggtttcgacgttgctgagttcgtgggccctgcccgcgtgttcgagcgcgagcgtgaagcactggatgctttgactgccggcacgatcgaggctggttctgttgtcgtcattcgctatgaaggacccaagggtggaccgggcatgcgcgagatgctcgcgatcacggcggccatcaagggcgctggactcggcaaagatgtactactcttaacagacggacgattctcaggcggcacaaccggactgtgtatcggccacatagctcccgaagcagtagacgcaggtcctattgccttcgtgcgcgatggtgatcttatacgggtcgatatcgcagctcgctcgctcgacttacttgtcgactccgctgagctcgaagcccgccgaaaaggctgggcccccctccctccgcgctacacgcgaggtgttctggccaagtattcgaagcttgttcagtccgccgctcgcggcgcggtcaccagttag

SEQ ID NO: 34 - protein, 567 aa, Marine actinobacterium
MSESDSIDIKPRSRTVTDGIEATTSRGMLRAVGMGDADWEKPQIGIASSWNEITPCNLSLDRLAQAAKEGVHAGGGYPLQFGTISVSDGISMGHEGMHFSLVSREVIADSVEVVMEAERLDGSVTLAGCDKSLPGMLMAAARLNLASVFLYAGSIAPGWVKLSDGTEKDITIIDSFEAVGAVKAGRMSEADAKRIECAFAPGEGACGGMYTANTMASVAEALGMSLPGSASPASADRRRDYFAHRSGEAVVNLLRLGITSRDIMTKKAFENAITVAMALGGSTNVVLHILAIASEAEVELTLDDFNRIGDKVPHLGDLKPFGQYVMNDVDRHGGLPVLMKALMEEGLIHGDALTVTGKTVAENLAEMDIDPLDGKVLRKFDNPIHPTGGLTILKGSFAPEGAVVKTAGFDVAEFVGPARVFEREREALDALTAGTIEAGSVVVIRYEGPKGGPGMREMLAITAAIKGAGLGKDVLLLTDGRFSGGTTGLCIGHIAPEAVDAGPIAFVRDGDLIRVDIAARSLDLLVDSAELEARRKGWAPLPPRYTRGVLAKYSKLVQSAARGAVTS

SEQ ID NO: 35 - DNA, 1695 bp, Clavibacter michiganensis
atgcctgagatcgacatgaagccccggagccgcgacgtcaccgacgggatcgaggccaccgcagcacgcggcatgctccgcgccgtcgggatgggcgacgaggactgggcgaagccccagatcggcgtcgcgagctcctggagcgagatcaccccctgcaacctcagcctcgaccgcctcgcgcagggcgccaaggagggcgtgcacgcgggcggcggctacccgctccagttcggcaccatctccgtcagcgacggcatctcgatgggccacgagggcatgcacttctcgctcgtctcgcgcgaggtcatcgccgacagcgtcgagaccgtcatgatggccgagcgcctcgacgggtccgtgctcctcgcgggctgcgacaagtcgctccccggcatgctcatggccgcggcccgcctcgacctctcctcggtgttcctctacgcgggatccatcgcccccggctgggtcaagctctcggacggcaccgagaaggaggtcaccatcatcgacgccttcgaggcggtcggcgcctgcaaggccggcacgatgagccaggaggacctgacccgcatcgagaaggccatctgcccgggcgagggcgcatgcggcggcatgtacacagcgaacaccatggcgagcgtggccgaggccctcggcatgagcctccccggatccgccgccccgccgagcgccgaccgccgccgcgactacttcgcgcaccggtcgggcgaggccgtcgtcaacctcatcgcggagggcatcaccgcgcgcgacatcatgacgaaggaggcgttcgagaacgccatctccgtggtcatggcgttcggcggatccaccaacgcggtcctccacctcctcgccatcgcgcgcgaggccgaggtcgacctgcagctgtccgacttcaaccgcatcgccgaccgcgtgccgcacctcggcgacctcaagccgttcggccgcttcgtcatgaacgacgttgaccgcgtcggcggcgtccccgtcgtcatgaaggccctgctcgacgcgggcctcctgcacggcgacgtcatgaccgtcaccggccgcaccatgcgcgagaacctcgaggcgatggacctcgcggagctcgacggcacggtcatccggaagatggacgacccgatccacgccaccggcggcatcagcgtcctgcacggctccctcgcccccgagggcgcggtcgtgaagacggccggcttcgacctcgacgtgttcgagggccccgcccgcgtcttcgagcgcgagcgcgccgcgatggacgcgctcaccgagggactcatctcgaagggcgacgtcatcgtcatccgctacgagggccccaagggcggccccggcatgcgcgagatgctcgccatcacgggcgccatcaagggagccggcctcggcaaggatgtactactcttgacggacggtcgattctcaggcggcacaaccggactgtgcatcggccacatggctcccgaagcggtggacgcaggtcccgtcgccttcgtgcgcgatggagaccggatccgtgtcgacatcgccgctcgcacgctcgacctactggtcgacgaggccgagctcgccgcccgccgtgaggggtgggcacctctcccgccgcgctacacgcgcggggtcctcgccaagtacgccaagctcgtgcactcggccgccgagggcgcgatcacgggatga

SEQ ID NO: 36 - protein, 564 aa, Clavibacter michiganensis
MPEIDMKPRSRDVTDGIEATAARGMLRAVGMGDEDWAKPQIGVASSWSEITPCNLSLDRLAQGAKEGVHAGGGYPLQFGTISVSDGISMGHEGMHFSLVSREVIADSVETVMMAERLDGSVLLAGCDKSLPGMLMAAARLDLSSVFLYAGSIAPGWVKLSDGTEKEVTIIDAFEAVGACKAGTMSQEDLTRIEKAICPGEGACGGMYTANTMASVAEALGMSLPGSAAPPSADRRRDYFAHRSGEAVVNLIAEGITARDIMTKEAFENAISVVMAFGGSTNAVLHLLAIAREAEVDLQLSDFNRIADRVPHLGDLKPFGRFVMNDVDRVGGVPVVMKALLDAGLLHGDVMTVTGRTMRENLEAMDLAELDGTVIRKMDDPIHATGGISVLHGSLAPEGAVVKTAGFDLDVFEGPARVFERERAAMDALTEGLISKGDVIVIRYEGPKGGPGMREMLAITGAIKGAGLGKDVLLLTDGRFSGGTTGLCIGHMAPEAVDAGPVAFVRDGDRIRVDIAARTLDLLVDEAELAARREGWAPLPPRYTRGVLAKYAKLVHSAAEGAITG

SEQ ID NO: 37 - DNA, 1707 bp, Saccharopolyspora erythraea
gtgagcaccagcactgatggcacaggacagtcggggcgtggtctgaagccccgcagcggtgacgtgaccgaggggatcgaacgtgctgcggcgcgggggatgctccgggcggtcgggatgcaggacgccgacttcgcgaagccccagatcggggtggcgtcctcgtggaacgagatcacgccgtgcaacctgtcgttgcagcggctcgcgcaggcgagcaaggaaggtgtgcacgcggccggcggcttcccgatggagttcgggacgatctcggtctcggacgggatctcgatgggtcacgtcggcatgcactactcgctcgtgtcccgcgaggtcatcgccgactccgtcgagacggtgatggaggcggagcggctcgacgggtccgtgctgctcgccggctgcgacaagagcctgccgggcatgctgatggccgcggcgcgcctggacgtcgcggcggtcttcgtctacgccgggtcgatcctccccgggcgggtcgacgaccgcgaggtcaccatcatcgacgcgttcgaggcggtgggcgcctgcgcccgcggcctgatcagcgaggccgaggtcgaccgcatcgaacgcgccatctgcccgggagagggcgcgtgcggcggcatgtacaccgcgaacaccatggcctgcgcggcagaggcgatgggcatgtcgctgccgggatcggcgagcccgccgtcggtagaccggcggcgcgacgccggagcccgggaggccgggcgcgcggtggtcgggatgatcgagcgcggactgaccgcgcggcagatcctgaccaaggaggcgttcgagaacgccatcgccgttgtgatggcgttcggtggctccaccaatgccgtgctgcacctgttggcgatcgcgcgggaagccgaggtcgacctgacgctcgacgacttcaaccgcatcggtgaccgcgtcccgcacctcgccgacgtcaagcccttcggtcggcacgtgatgaccgcggtggaccggatcggtggcgtgccggtcgtgatgaaggccctgctcgacgccgggttgctgcacggcgactgcatgacggtcaccgggaagacggtggccgagaacctcgccgagctggatccgccggagctcgacggtgaggtcctgcacaagctgtcgaacccgctgcacccgaccggcgggctgacgattctgcgcggatcgctcgccccggaaggtgcggtggtcaagagcgccgggttcgactccgccactttcgaaggcacggcgcgggttttcgacggcgagcagggtgcgatggacgccgtcgaagacggctcgttgaaggccggcgacgtggtggtgatccggtacgaagggccgcgcggtggtccgggtatgcgcgagatgctcgcggtcaccggtgccatcaagggcgcgggcctgggcaaggacgtcctgctgctgacggacggccgtttctccggcggtaccacggggctgtgcatcggtcacgtggctcccgaggcgaccgacggcgggccgatcgcgttcgtgcgcgacggggacccgatccggctcgacctggcgggccggacgctcgacctgctggtggacgaagccgaactcgcgcgccggaaggaaggctgggtgccgcgggagccgaagttccggcagggcgtgctcgggaagtacgcgcggctggtccggtcggcggcggtgggcgcggtctgctcctga

SEQ ID NO: 38 - protein, 568 aa, Saccharopolyspora erythraea
MSTSTDGTGQSGRGLKPRSGDVTEGIERAAARGMLRAVGMQDADFAKPQIGVASSWNEITPCNLSLQRLAQASKEGVHAAGGFPMEFGTISVSDGISMGHVGMHYSLVSREVIADSVETVMEAERLDGSVLLAGCDKSLPGMLMAAARLDVAAVFVYAGSILPGRVDDREVTIIDAFEAVGACARGLISEAEVDRIERAICPGEGACGGMYTANTMACAAEAMGMSLPGSASPPSVDRRRDAGAREAGRAVVGMIERGLTARQILTKEAFENAIAVVMAFGGSTNAVLHLLAIAREAEVDLTLDDFNRIGDRVPHLADVKPFGRHVMTAVDRIGGVPVVMKALLDAGLLHGDCMTVTGKTVAENLAELDPPELDGEVLHKLSNPLHPTGGLTILRGSLAPEGAVVKSAGFDSATFEGTARVFDGEQGAMDAVEDGSLKAGDVVVIRYEGPRGGPGMREMLAVTGAIKGAGLGKDVLLLTDGRFSGGTTGLCIGHVAPEATDGGPIAFVRDGDPIRLDLAGRTLDLLVDEAELARRKEGWVPREPKFRQGVLGKYARLVRSAAVGAVCS

SEQ ID NO: 39 - DNA, 1677 bp, Acidothermus cellulolyticus
atgcgcgctcagcccgatctcaaaccgcgcagccgtgacgtcaccgatgggctggagcgggccgcggcccgcggcatgctccgcgccgtcggaatgaccgatgcggactgggagaaaccccagatcggagtggcgagttcctggaacgagataacgccctgcaacctctccctcgaccggctcgcgcaggcggccaaggagggcgtgcacgccgccggcgggtatccgctggagttcgccaccatctcggtttccgacggcatctccatgggccatgagggaatgcatttctcgctgatttcccgcgaagtcatcgccgattccgtcgaaaccgtcttcatggctgagcgcttcgacggcgccgtcctgcttgccggttgcgacaagtccgaacccggcatgctgatggcggccgcccggcttgacctggcagcggttttcctctatgccggcagcacgttgccggggaaactcggggaccgggacatcaacatcgtcgatgcgttcgaggctgtcggcggttgccttcgcggcctggtgagccgggaagaggtcgacgccatcgaacggaatttctgtccggtcgaaggggcctgcgcgggcatgttcaccgccaacacgatggccagcgcggcggaagcgctcggcatgtcattgcccggttcggcctcgccgcccgcgccggaccgccggcgcgacggtttcgcccgggcctccggggaggcagtcgtcaacctgctccgccgcggcatcaccgcccgggacatcatgacccgggaggcattcgagaacgcgatcgctgtcgtgatggccctgggcggctccaccaacgccgtgctccatctgctcgcgatcgcccgcgaggcgaacgtcgacctcgccatcgacgatttcaaccggatcggggaccgggtcccgcacttggcggatgtcaagccgttcggccggtacgtgatgagtgacgtcgaccgggtcggcggcgtgcccgtggtgatgaaagcgctgctggacgccgggctgctgcacggcgactgcctgacggtgaccggcaagacggtggcggagaacctcgcggacatcaccccgccggaccccgacggcaaggtgattcacgcgctcacccaaccgatccaccgcaccggcgggctggccattctccgcggttcgctcgccccggacggcgcggtggtgaagaccgccgggctggagtcgacgttcttcgaaggcaccgcccgggtgttcgacggcgaggaggcggccatgcgcgccgtgcccgagctgcgtccgggagatgtcgttgtcatccggtacgaggggccgaaaggcggcccagggatgcgggagatgctcgcggtcaccggcgccatcaagggcgcgggcctcggcaaggatgtgctcctcgtcaccgacggccggttctccggcggtaccacgggtttctgtgtcgctcacgttgctccggaggcggtggacgggggaccgatcgcgttcgtccgggacggtgaccgcatccggctggacgcgcaggcccgtaccctcgacctgctggtggacgccgatgagctggccaaacgacgggccgactggcaaccgccgccgccgcggtacaccaccggagtcgcggccaagtacgtcaagctggttggcagcgcctccgagggtgcgatctgtcggtga

SEQ ID NO: 40 - protein, 558 aa, Acidothermus cellulolyticus
MRAQPDLKPRSRDVTDGLERAAARGMLRAVGMTDADWEKPQIGVASSWNEITPCNLSLDRLAQAAKEGVHAAGGYPLEFATISVSDGISMGHEGMHFSLISREVIADSVETVFMAERFDGAVLLAGCDKSEPGMLMAAARLDLAAVFLYAGSTLPGKLGDRDINIVDAFEAVGGCLRGLVSREEVDAIERNFCPVEGACAGMFTANTMASAAEALGMSLPGSASPPAPDRRRDGFARASGEAVVNLLRRGITARDIMTREAFENAIAVVMALGGSTNAVLHLLAIAREANVDLAIDDFNRIGDRVPHLADVKPFGRYVMSDVDRVGGVPVVMKALLDAGLLHGDCLTVTGKTVAENLADITPPDPDGKVIHALTQPIHRTGGLAILRGSLAPDGAVVKTAGLESTFFEGTARVFDGEEAAMRAVPELRPGDVVVIRYEGPKGGPGMREMLAVTGAIKGAGLGKDVLLVTDGRFSGGTTGFCVAHVAPEAVDGGPIAFVRDGDRIRLDAQARTLDLLVDADELAKRRADWQPPPPRYTTGVAAKYVKLVGSASEGAICR

SEQ ID NO: 41 - DNA, 1704 bp, Corynebacterium efficiens
atgaccaacgatcatgacatcgatatcaagccacgttcacgcgatgtgaccgacggcctggaacgcaccgccgcccggggcatgctccgggcagtcggcatgggcgacgacgactgggagaaaccccagatcggtgtggccagctcctggaatgaaatcaccccctgtaatctcacgctgaagaagcttgctggatttgccaaggagggtgtccacgaggcggggggttaccccctggagttcgggaccatctccgtctccgacggtatctccatgggccacgagggcatgcactattccctggtatcccgcgaggtcatcaccgactccgtggaaaccgtcatgagtgccgagcgactggacggttctgttctactcgccggctgtgacaaatccattcccggcatgctcatggccgccgcccggttgaatctgtcctcggtgttcctctacaacggatccaccatgccgggcaccgcgaagatgtccgacggtacggagcgggaggtcaccctcatcgatgccttcgaggccgtcggagcctgtcgtgcgggaaccatgagccgggaggacgtggatgccattgaacgctccgtgtgccccggggagggtgcctgtggcggcatgtacacagccaacaccatggcctcggctgctgaggccatgggcatgtccctgcccggttccgccgctcccccggcgatccaccaggaccgcaccctctatgcccgccgttccggcgaggcggtggtggaactgctgcgcaggggaatccgtgcccgtgacatcatcacacgggaatcactgctcaatgccgtcgccgtggtcatggcgctgggtggctccaccaacgcggttctgcacctcatggccatcgcccacgaggccgaggtggatctcaccttggaggacttcaacgccgtcggcgacaaggtcccccaccttggtgacctcaaacccttcggccggtatgtgatgaacgacgtattcaagatcggcggcatccccgtggtgatgaaagcgcttctcgacgccggcctcatcaacggcgactgcctcaccatcaccggccggaccgttgcggagaacctccagggcatcaacccaccggatcccgacggccagatcctacgggccattgacaacccgatccacaagaccggtgggctgaccatcctgcacggttccctcgcaccgggtggtgccgtggtcaaaaccgctggtttcgacaccgaacgcttcgagggcaccgcccgtgtcttcaaccaggaagcacccgccatggatgcggtgctcaacggtgaactgaaggctggcgacgtggtgatcatccgctacgagggaccgaagggcggccccggcatgcgcgagatgctcgccatcaccggtgccatcaagggtgccggcatcggcaaggaggtgctgctcatcaccgacggtcgtttctccggtgggtccaccggcctgtgcatcgggcatgtggcccccgaggccgtcgacggcggacctatcgccctcgttgaagacggcgatcccatcctggtcgacatcagccaacgacgtatcgatctcctggtagacgaatccattctggaggagcgcaggaaaaccctgcagcatccggagaatccacgtctccacggcgtgctggggaagtacgccaagctggtgcagtcagcctcaatgggcgcggtctgcttctag

SEQ ID NO: 42 - protein, 567 aa, Corynebacterium efficiens
MTNDHDIDIKPRSRDVTDGLERTAARGMLRAVGMGDDDWEKPQIGVASSWNEITPCNLTLKKLAGFAKEGVHEAGGYPLEFGTISVSDGISMGHEGMHYSLVSREVITDSVETVMSAERLDGSVLLAGCDKSIPGMLMAAARLNLSSVFLYNGSTMPGTAKMSDGTEREVTLIDAFEAVGACRAGTMSREDVDAIERSVCPGEGACGGMYTANTMASAAEAMGMSLPGSAAPPAIHQDRTLYARRSGEAVVELLRRGIRARDIITRESLLNAVAVVMALGGSTNAVLHLMAIAHEAEVDLTLEDFNAVGDKVPHLGDLKPFGRYVMNDVFKIGGIPVVMKALLDAGLINGDCLTITGRTVAENLQGINPPDPDGQILRAIDNPIHKTGGLTILHGSLAPGGAVVKTAGFDTERFEGTARVFNQEAPAMDAVLNGELKAGDVVIIRYEGPKGGPGMREMLAITGAIKGAGIGKEVLLITDGRFSGGSTGLCIGHVAPEAVDGGPIALVEDGDPILVDISQRRIDLLVDESILEERRKTLQHPENPRLHGVLGKYAKLVQSASMGAVCF

SEQ ID NO: 43 - DNA, 1713 bp, Brevibacterium linens
atgagcattgatacgaactccaccaaaccggacatcaaaccacgttctcgcgacgtcaccgacggtctcgaagccaccgctgcgcgcggcatgctgcgtgccgtgggaatgggcgatgacgactgggtcaagccgcagatcgccatcgcgacctcgtggaacgagatcaccccgtgcaacatgtccctgcagcgcctcggtgcggccgccaaggaaggcgtgcacgaatcgggcggattccccctggaattcggcaccatctccgtctccgacggcatctccatgggccacgagggcatgcactactcgctggtctcgcgcgaggtcatcaccgactccgttgagaccgtgatgagcgccgaacgactcgacggatcggtcctcatggccggctgcgacaagtcgatcccgggcatgctcatggcatccgcccgcctcggcctctccagcgtattcctctacaacggctcgatcatgccgggtaccgcgaagatggaggacggcaccgagaaggaagtcaccctcatcgacgccttcgaagcagtcggcgcctgccgtgccggaaccatcagccaaaaagacgtcgactccatcgagcgcgccgtctgcccgggtgaaggcgcctgtggtggcatgtacaccgcgaatacgatggcctcggccgccgaggccatgggcatgtccctgccaggctcggccgcacctcctgccatccaccgcgaccgcacgatgttcgcgcgcaaatccggtgatgctgtcgtcaacctgctgcgtcagggaatcacgacgaaggacatcatcacccgcgaatcgctgcacaacgcgatcgccgtggtcatggccttcggcggatcgaccaacgcggttctccacctcctggccatcgcccacgaggccggagtcgaactcgccctcgatgacttcaaccgcatcggcgacaaggtcccgcacctgggcaacgtcaaacccttcggccagtacgtgatgaacgatgtgttcaagatcggcggcgtgccggtgatcatgaaggctctgctcgacaacggaatgctcaacggcgactgcatgaccgtgacgggaaagaccgtggcggagaacctcgagacgatcaacccgccggaccccgacggcaagatcctgcgcgcgctcaacaacccgattcacgccaccggcggcctcaccgtgctcaagggctcgttggctcccgaaggtgcagtcgtgaagtccgccggcttcgatgccgacgtcttcgaaggcaccgctcgcgtgttcaaccaggagaagccggccatggatgccgtcctcaacggtgagctgaagaagggcgatgtcgtcgtcatccgctacgaaggacccaagggcggacccggtatgcgcgagatgctcgccatcaccggtgcgatcaagggcgcgggaatcggcaaggacgtcctgctcatcaccgacggacgcttctccggcggatcgacgggactgtgcatcggtcacgtggcgcccgaggccgtcgacggcggaccgatcgcactcgtcgaggacggcgacaagatcaccgtcgacatcgcggcacggtccatcgacctgcatgttgacgagtcggtgctcgaagagcgtcgcaagacctggacgattcccgagaaccaccgcctcaccggtgtgctcggaaagtacgcgaagctcgtgcagtcggcctccaccggtgccgtctgcttctga

SEQ ID NO: 44 - protein, 570 aa, Brevibacterium linens
MSIDTNSTKPDIKPRSRDVTDGLEATAARGMLRAVGMGDDDWVKPQIAIATSWNEITPCNMSLQRLGAAAKEGVHESGGFPLEFGTISVSDGISMGHEGMHYSLVSREVITDSVETVMSAERLDGSVLMAGCDKSIPGMLMASARLGLSSVFLYNGSIMPGTAKMEDGTEKEVTLIDAFEAVGACRAGTISQKDVDSIERAVCPGEGACGGMYTANTMASAAEAMGMSLPGSAAPPAIHRDRTMFARKSGDAVVNLLRQGITTKDIITRESLHNAIAVVMAFGGSTNAVLHLLAIAHEAGVELALDDFNRIGDKVPHLGNVKPFGQYVMNDVFKIGGVPVIMKALLDNGMLNGDCMTVTGKTVAENLETINPPDPDGKILRALNNPIHATGGLTVLKGSLAPEGAVVKSAGFDADVFEGTARVFNQEKPAMDAVLNGELKKGDVVVIRYEGPKGGPGMREMLAITGAIKGAGIGKDVLLITDGRFSGGSTGLCIGHVAPEAVDGGPIALVEDGDKITVDIAARSIDLHVDESVLEERRKTWTIPENHRLTGVLGKYAKLVQSASTGAVCF

SEQ ID NO: 45 - DNA, 1710 bp, Tropheryma whipplei
gtgtttatgtcgagcgatgcaaatgcctgtgaaatagatataaagccgagaagccgagtcgtaacccatgggatcgaggcgacaacatcgcgtggtatgctgcgcgccgttggaatgggtgatgctgattgggaaaaaccacagattggcattgcatccagttggaataacataactccgtgcaatttgtcacttgacagacttgcgcagggtgcaagggaaggtgttcacgcagccggtgggtatccgctgcagttttgcactatatcggtttccgacggaatctctatgggtcatgagggaatgcatttttctcttgtttctcgcgaagttattaccgacagcgtggaaaccgttctgatggcagaggcactggatggtgttgttcttcttgctggctgtgataaatccctcccgggtatgcttatggcagctgcaaggcttgatgtgtctgcagtatttctatatgccggcagtattgcccccggttatgtcacactcaagtgtggcgagtcaaaagaagttacaataattgattcattcgaagccgttggtgcctataaggcagggcttattgatcaggatgatcttggccggattgaaagggccatatgccccggggagggcgcatgtggcggcatgtatacggcaaacacaatggcatctgttgcagaagcgcttggtatgagtcttttgggttcggcaagtccaccctcggcagatcgtcgtcgtgatgtttatgcacataagtcgggcgaggcggttgttgagctcctgaagcggggtataaccgcaagagatattttgacaaaagaggcatttgaaaatgcgatagcagttgttatggcccttggcggatctacaaacgccgttttgcatttacttgcgatagctcatgaggcccatgtgccactgacgatagacgattttaacaaaatcgggaatagggttcctcatattgcagacctcaagccttttgggcgctatgtaatgaatgatgtagatcgcgtgggaggtattccagttgttataaatgcattgatgcgggaaggttttatacacggtgatgtaattaccgtttcaggcagaacaatggccgaggagatatctgatatcaatccgggccttcccgacggaaaggttatacactctttttcctcacctctgcacccaacaggcggtataaaggtattaaaaggtacgcttgcaccggatggggccgttgcaaaaacagctggtttcgatactgtggtttttcaaggccccgcaatggtgtttgatcgcgagcgcgcggctatggatgctctcagtgctgggaatataaaaaaggggagcgttattgttattcgctatgaaggcccaaaagggggtccgggtatgcgagagatgctggctattaccgcggcaataaagggaagtggccttggtaaagatgttttattgttgacagacggcaggttctcgggcggtacaaccggtctgtgtatagggcatattgcgccagaggcggttgatcttgggccgattgcgtttgtgcaagatggcgatataatccgcgttgatattgagaaatcgagtattgatgttctggttgatgaaaagcaattgcgcgccaggcacttgactccacccccacccaggtatacaagcggtgttctttcaaaatattcaaaactcgtcaaatctgcttctttgggtgcaataacttag

SEQ ID NO: 46 - protein, 569 aa, Tropheryma whipplei
MFMSSDANACEIDIKPRSRVVTHGIEATTSRGMLRAVGMGDADWEKPQIGIASSWNNITPCNLSLDRLAQGAREGVHAAGGYPLQFCTISVSDGISMGHEGMHFSLVSREVITDSVETVLMAEALDGVVLLAGCDKSLPGMLMAAARLDVSAVFLYAGSIAPGYVTLKCGESKEVTIIDSFEAVGAYKAGLIDQDDLGRIERAICPGEGACGGMYTANTMASVAEALGMSLLGSASPPSADRRRDVYAHKSGEAVVELLKRGITARDILTKEAFENAIAVVMALGGSTNAVLHLLAIAHEAHVPLTIDDFNKIGNRVPHIADLKPFGRYVMNDVDRVGGIPVVINALMREGFIHGDVITVSGRTMAEEISDINPGLPDGKVIHSFSSPLHPTGGIKVLKGTLAPDGAVAKTAGFDTVVFQGPAMVFDRERAAMDALSAGNIKKGSVIVIRYEGPKGGPGMREMLAITAAIKGSGLGKDVLLLTDGRFSGGTTGLCIGHIAPEAVDLGPIAFVQDGDIIRVDIEKSSIDVLVDEKQLRARHLTPPPPRYTSGVLSKYSKLVKSASLGAIT

SEQ ID NO: 47 - DNA, 1731 bp, Methylobacterium extorquens
atggacgcgcgtcagaccgacaagtcgaagctgccgagccggcacgtgacggaggggcccgagcgggcgccccaccgctcgtacctctacgccatgggcctgacgaccgagcagatccaccagccgctggtcggcgtcgcctcgtgctggaacgaggccgcgccctgcaacatctcgctgatgcgccaagcccaggccgtgaagaagggtgtcgccgccgccaagggcactccgcgcgagttctgcaccatcaccgtcaccgacggcatcgccatgggccatggcggtatgcgcgcctcgctgccttcccgcgaggtcatcgccgattcggtcgagctgacgatccgcggccattcctacgacgccctcgtggggctggccggctgcgacaagtccctgcccggcatgatgatggccatggtgcgcctcaacgtgccctcgatcttcatctatggcggctcgatcctgccgggctcgttccgcggccggccggttacggtgcaggatctgttcgaggcggtcggcaaggtcgccgtcggcgacatgagcctcgacgacctcgacgagctggagcgggttgcctgcccctcggccggcgcctgcggcgcgcagttcaccgccaacaccatggccaccgtctccgaggcgatcggcctcgcgctgccctactcggccggcgcgcctgccccttacgagatccgcgaccaattctgcgccgccgccggcgagaaggtgatggagctgatcgccaagaacatccgcccgcgcgacatcgtcacccgcaaggcgctggagaacgccgccgcgacggtcgcggcctcgggcggctcgaccaacgcggccctgcacctgccggcgatcgcgcatgaatgcggcatcgagttcaccctgttcgacgtcgccgagatcttccgcaagaccccctacatcgccgacttgaagcccggcgggcgctatgtggccaaggacatgttcgaggtcggcggcatcccgctgctgatgaagacgctgctcgaccacggctacctgcacggcgactgcctcaccgtcaccggccgcaccatcgccgagaacctcgccaaggtcgcctggaacccggatcaggacgtggtgcgcccggccgacaagcccatcaccgtcaccggcggcgtggtgggcctgcgcggcaatctcgcccccgagggcgcgatcgtgaaggtcgccggcatgccgcccgaggcccaggtcttcaccggcccggcccgcgtcttcgacggcgaggaagcctgtttcgaggcggtgcagaaccgcacctacaagcccggcgacgttctggtcatccgttacgagggcccgaagggaggccccggcatgcgcgagatgctctcgaccaccgccgccctctacggccagggcatgggcgacaaggtggccctcatcaccgacgggcgcttctccggcgcgacccgcggcttctgcgtcggccatgtcggccccgaggctgccatcggcgggccgatcggcctgctgcgcgacggcgacatcatcaccctcgatgcgatcaagggcacgctcgacgtggcgctctccgacgaggaactggcccagcgtcgcagcgaatggacgccgcggggcaatgccgcgacctccggctacctctggaaatacgcgcagtccgtcgggcctgcagtgaacggggccgtgacgcatccgggcggcgcgggggagacgaacgtctatgccgacatctag

SEQ ID NO: 48 - protein, 576 aa, Methylobacterium extorquens
MDARQTDKSKLPSRHVTEGPERAPHRSYLYAMGLTTEQIHQPLVGVASCWNEAAPCNISLMRQAQAVKKGVAAAKGTPREFCTITVTDGIAMGHGGMRASLPSREVIADSVELTIRGHSYDALVGLAGCDKSLPGMMMAMVRLNVPSIFIYGGSILPGSFRGRPVTVQDLFEAVGKVAVGDMSLDDLDELERVACPSAGACGAQFTANTMATVSEAIGLALPYSAGAPAPYEIRDQFCAAAGEKVMELIAKNIRPRDIVTRKALENAAATVAASGGSTNAALHLPAIAHECGIEFTLFDVAEIFRKTPYIADLKPGGRYVAKDMFEVGGIPLLMKTLLDHGYLHGDCLTVTGRTIAENLAKVAWNPDQDVVRPADKPITVTGGVVGLRGNLAPEGAIVKVAGMPPEAQVFTGPARVFDGEEACFEAVQNRTYKPGDVLVIRYEGPKGGPGMREMLSTTAALYGQGMGDKVALITDGRFSGATRGFCVGHVGPEAAIGGPIGLLRDGDIITLDAIKGTLDVALSDEELAQRRSEWTPRGNAATSGYLWKYAQSVGPAVNGAVTHPGGAGETNVYADI

SEQ ID NO: 49 - DNA, 1734 bp, Methylobacterium nodulans
atggacgcgcgtcacaccatcgacaagtcgaagctgccgagccgctatgtcaccgaggggccggcccgggcgccgcatcgctcgtatctctatgcgatggggctgacgcgggagcagatccaccagccgctggtgggcgtcgcctcctgctggaacgaggccgccccctgcaacatcgcgctcatgcgccaggcgcaggcggtgaagaagggcgtcgccgccgcggccggtaccccgcgggaattctgcaccatcacggtcaccgacggcatcgccatgggccaccggggcatgcgcgcctcgctgccctcccgggaggtcatcgccgattccgtcgagctcaccatgcggggccacgcctacgacgccctggtggggctcgcgggctgcgacaagtccctgcccggcatgatgatggcgatggtgcgcctgaacgtgccgtcgatcttcatctatggcggctcgatcctgcccggctccttccgcgggcggccggtcacggtccaggacctgtttgaggcggtcggcaagcactccgtcggccagatgagcgacgaggatctggacgagctggagcaggtcgcctgcccgtcggccggcgcctgcggggcgcagttcaccgccaacacgatggcgaccgtctccgaggcgatcggcctcgcgctgccctattcggccggcgcgcccgctccctacgagatccgcgacaagttctgcgcggcggccggcgagatggtgatggatctcctcgccaagaacatccgcccgcgcgacatcatcacccgcaaggcgctggagaacgccgccacggtggtcgccgcctccggcggctcgaccaatgcggcgctgcacctgccggccatcgcccacgaggcgggcatcgtcttcgacctgttcgacgtcgccgagatcttccggcgcacgccctacatcgccgacctcaagccgggcgggcgctacgtcgccaaggacctgttcgaggccggcggcatcccgctcctgatgaagaccctgctggaccacggcttcctgcacggcgactgcatcaccgtgaccggccgcaccatcgccgagaacctcgccaaggtggcctggaacccggaccaggacgtcgtgcggccggccgacaccccgatcaccccgaccggtggcgtggtcggcctcaagggcaacctcgcccccgagggcgcgatcgtgaaggtcgccggcatgccggccgaccgccaagtattcgccggcccggcccgcgtcttcgacaacgaggaagcctgtttcgaggcggtgcagaaccgccagtacaaggagggcgacgtcctcgtcatccgctacgagggcccgaagggcggccccggcatgcgcgagatgctggcgaccaccgccgccctctacggccagggcatgggcgacaaggtcgcgctcatcacggacggccgcttctcgggcgcgacccgcggcttctgcgtcggccatgtcgggcccgaggccgcaatcggcggcccgatcggccttctcaaggacggggacatcatccggctcgacgcgatccagggcatcctctcggtcgatctctccgacgaggaactggccgagcgccgcaaggcctggaccccgcgcgcgaacgaggcgacctccggctatctctggaaatacgcgcagaccgtcggcccggcggtgaccggcgccgtgacgcatccgggcggagcccaggagacgctcacctatgcggacatctga

SEQ ID NO: 50 - protein, 577 aa, Methylobacterium nodulans
MDARHTIDKSKLPSRYVTEGPARAPHRSYLYAMGLTREQIHQPLVGVASCWNEAAPCNIALMRQAQAVKKGVAAAAGTPREFCTITVTDGIAMGHRGMRASLPSREVIADSVELTMRGHAYDALVGLAGCDKSLPGMMMAMVRLNVPSIFIYGGSILPGSFRGRPVTVQDLFEAVGKHSVGQMSDEDLDELEQVACPSAGACGAQFTANTMATVSEAIGLALPYSAGAPAPYEIRDKFCAAAGEMVMDLLAKNIRPRDIITRKALENAATVVAASGGSTNAALHLPAIAHEAGIVFDLFDVAEIFRRTPYIADLKPGGRYVAKDLFEAGGIPLLMKTLLDHGFLHGDCITVTGRTIAENLAKVAWNPDQDVVRPADTPITPTGGVVGLKGNLAPEGAIVKVAGMPADRQVFAGPARVFDNEEACFEAVQNRQYKEGDVLVIRYEGPKGGPGMREMLATTAALYGQGMGDKVALITDGRFSGATRGFCVGHVGPEAAIGGPIGLLKDGDIIRLDAIQGILSVDLSDEELAERRKAWTPRANEATSGYLWKYAQTVGPAVTGAVTHPGGAQETLTYADI

SEQ ID NO: 51 - DNA, 1725 bp, Rhodopseudomonas palustris
atggacgcgaaggcgacgctcaagtcgaagctccccagccggcacgtgaccgaagggccggcgcgcgcgccccatcgctcttacctctacgccatgggcctcaccaccgagcagatccaccagccgttcgtcggggtggcgtcgtgctggaacgaggccgcgccctgcaacatttcgctgatgcggcaggctcaggcggtcaagaagggcgtcgcctccgccggcggcaccccgcgcgaattctgcaccatcaccgtgactgacggcatcgccatgggccacgagggcatgcgctcgtcgctgccgtcgcgcgaggtgatcgccgactccgtcgagctgacaatccgcggccactcctatgacgcgctggtcgggctggccggctgcgacaagtctctgcccgggatgatgatggcgatggtccggctcaacgtgccgtcgatcttcatctatggcggctcgatcctgccgggcaccttccggggccagcaggtcaccgttcaggacatgttcgaggcggtcggcaagcactcggtcggcgagatgtcggacgacgacctcgacgaaatcgagcgggtcgcctgtccgtcggccggcgcctgcggcgcgcagttcaccgccaacaccatggcgaccgtgtccgaggcgatcggcctagcgctgccgtattcggccggcgcacctgctccttacgaaatccgcgatgcgttctgcacggcggccggcgagaaggtgatggagctgatcgccgccaacatccggccgcgcgacatcgtcacccgcaaggcgctggagaatgcggccgcggtggtagcagcgtccggcggctcgaccaatgctgcgctgcacctaccagcgatcgcgcatgaatgtggtatcaagttcgatctgtttgatgtcgccgaaatcttcaaaaagacaccatatatcgcggatttgaagccaggcggccgttatgtcgccaaagacatgtatgaagttggcggcataccgctcctgatgaagaccctgctcgatcatggcttcctccacggcgactgcctgaccgtcacgggacggacgatcgccgagaatctgaaagccgtgaagtggaatccgcatcaggacgtggtgcggcaggcgaaccatccgatcaccgtgactgggggcgtcgtcgggctgaagggaaacctcgcaccagaaggtgcgatcgtgaaggtcgcgggaatgtcgaacctgaagttttccgggcctgcccgctgcttcgatcgcgaggaagacgcgttcgaggcggtgcagaagcggacctacaaggaaggcgaggtcctcgtgatccgctacgaggggccgcggggcggccccggaatgcgggaaatgctcgccaccactgcggcgctgaccggccagggcatgggcggcaagatcgcgctgatcaccgacggccggttctccggcgccacccgcggcttctgcatcggccatgtcggcccggaagcggcgctgggtggtccgatcgcgctgctgcgcgacggtgacatcatcgtcatcgacgccgaggccggaacgcttgacgtaaatttgaccgacgacgaactggccgcgcgcaagtccgaatgggcgcatcgcgcgacaaaccacacgtcgggtgcgctttggaaatatgcccagcaggtcgggcccgcagtcagcggcgctgtgactcatccgggcggggcggccgagaagcagtgctatgcggatgtttga

SEQ ID NO: 52 - protein, 574 aa, Rhodopseudomonas palustris
MDAKATLKSKLPSRHVTEGPARAPHRSYLYAMGLTTEQIHQPFVGVASCWNEAAPCNISLMRQAQAVKKGVASAGGTPREFCTITVTDGIAMGHEGMRSSLPSREVIADSVELTIRGHSYDALVGLAGCDKSLPGMMMAMVRLNVPSIFIYGGSILPGTFRGQQVTVQDMFEAVGKHSVGEMSDDDLDEIERVACPSAGACGAQFTANTMATVSEAIGLALPYSAGAPAPYEIRDAFCTAAGEKVMELIAANIRPRDIVTRKALENAAAVVAASGGSTNAALHLPAIAHECGIKFDLFDVAEIFKKTPYIADLKPGGRYVAKDMYEVGGIPLLMKTLLDHGFLHGDCLTVTGRTIAENLKAVKWNPHQDVVRQANHPITVTGGVVGLKGNLAPEGAIVKVAGMSNLKFSGPARCFDREEDAFEAVQKRTYKEGEVLVIRYEGPRGGPGMREMLATTAALTGQGMGGKIALITDGRFSGATRGFCIGHVGPEAALGGPIALLRDGDIIVIDAEAGTLDVNLTDDELAARKSEWAHRATNHTSGALWKYAQQVGPAVSGAVTHPGGAAEKQCYADV

SEQ ID NO: 53 - DNA, 1725 bp, Rhodopseudomonas palustris
gtggacgccaactccaacatcaaggcgaggttgcccagccgtcacgtgacggaaggcccggagcgtgcgccgcaccgctcctacctctatgcgatggggttgaccacgcagcagatccaccagccgttcgtcggcgtggcatcgtgctggaatgaagccgcgccctgcaacatctcgctgatgcgccaggcccaggcggtgaagaagggcgtcgccgccgcgggtggtacgccacgcgaattctgcaccatcaccgtcaccgacggcatcgccatgggccatgacggcatgcgctcgtcgctgccgtcgcgcgaatgcatcgccgactcggtcgagctgaccatccgcggccactcctacgacgcgctggtcgggcttgccggctgcgacaagtcgctgcccggaatgatgatggcgatggtccggctcaacgtgccgtcgatcttcatctatggcggctcgatcctgcccggcaccttccgcggccagcaggtcaccgtgcaggacatgttcgaggcggtcggcaagcattcggtcggcgcgatgtcggacgccgacctcgacgaaatcgaacgggtggcgtgcccctcggccggcgcctgcggcgcccagttcaccgccaacaccatggcgacggtgtcggaggcgatcggcctggcgctgccttattcggccggagcacctgcgccctatgagatccgcgacgccttctgcatgaccgccggcgagcagatcatgacgctgatcgccaagaatatccggccgcgcgacatcgtcaccttgaaggcgctgcagaacgccgcggcggtggtggcggcctccggcggctcgaccaatgcggcgctgcacctgccggcgatcgcgcatgaatgcggcatcaaattcgacctgttcgacgtcgccgaaatcttcaaaaagacaccctatgtcgcggatttgaaacccggcggccgttatgtcgccaaagacatgtacgaagttggtggcataccgcttctgatgaaaacattgctcgatcatggctacctgcacggcgactgcctgacggtcaccggccggacgattgcggaaaatttggcaaccgtgaaatggaatcccgaccaggacgtggtgcgcgcagcggataacccgatcaccgtgaccggtggggtggtcgggctgcaaggcaacctcgcccccgagggggcgatcgtgaaggtcgccgggatgtccaacttgaaattctccggcccggcgcgctgcttcgatcgcgaagaggacgccttcgaggcggtgcagcacaagacctatcgcgaaggcgaagtgatcgtgatccgctacgaagggccgcgcggcggccccggcatgcgcgagatgctgtcgaccaccgcggcgctgaccgggcagggcatgggcggcaagatcgcgctgatcaccgacggccggttctccggcgccacccgcggcttctgcatcggccatgtcggaccggaagccgcgctcggcggcccgatcgcgctgttgcaggacggcgacatcatcgagatcgacgcggtggccggcacgcttaacgtaaaattgaccgaagccgaactctccgcgcgcaagaccaattggcagccgcgtgagaccaaccattcgtcaggcgcgttgtggaagtatgcccaacaggtcggccccgcgctcggtggcgcggtgacccatccgggtggttcgcacgagaaacagtgttatgcggatgtttaa

SEQ ID NO: 54 - protein, 574 aa, Rhodopseudomonas palustris
MDANSNIKARLPSRHVTEGPERAPHRSYLYAMGLTTQQIHQPFVGVASCWNEAAPCNISLMRQAQAVKKGVAAAGGTPREFCTITVTDGIAMGHDGMRSSLPSRECIADSVELTIRGHSYDALVGLAGCDKSLPGMMMAMVRLNVPSIFIYGGSILPGTFRGQQVTVQDMFEAVGKHSVGAMSDADLDEIERVACPSAGACGAQFTANTMATVSEAIGLALPYSAGAPAPYEIRDAFCMTAGEQIMTLIAKNIRPRDIVTLKALQNAAAVVAASGGSTNAALHLPAIAHECGIKFDLFDVAEIFKKTPYVADLKPGGRYVAKDMYEVGGIPLLMKTLLDHGYLHGDCLTVTGRTIAENLATVKWNPDQDVVRAADNPITVTGGVVGLQGNLAPEGAIVKVAGMSNLKFSGPARCFDREEDAFEAVQHKTYREGEVIVIRYEGPRGGPGMREMLSTTAALTGQGMGGKIALITDGRFSGATRGFCIGHVGPEAALGGPIALLQDGDIIEIDAVAGTLNVKLTEAELSARKTNWQPRETNHSSGALWKYAQQVGPALGGAVTHPGGSHEKQCYADV

SEQ ID NO: 55 - DNA, 1725 bp, Bradyrhizobium sp.
atggacgcgaagaccgacatcaagcgcaggctgcccagccgtcatgtgacggaagggccggagcgtgcgcctcatcggtcgtatctctacgcgatgggcctgaccacggcccaaatccatcagcccttcgtcggcgtcgcctcgtgctggaacgaggccgcgccctgcaacatcgcgctgatgcggcaggcgcaagccgtgaagaagggcgtggcccacgccggcggcacgccgcgcgaattctgcaccatcaccgtgaccgacggcatcgccatgggccatgacggcatgcgctcgtcgctgccgtcgcgcgaggcgattgccgattcggtcgagctgacgattcgcggtcatgcctacgacgcgctggttggcctcgccggctgcgataaatcgctgccgggcatgatgatggcgatggtccggctcaacgtgccgtcgatcttcatttatggaggctcgatcctgcccggcaatttccgcggccagcaggtcaccgtgcaggacatgttcgaggcggtcggcaagcattcggtcggcgcgatgtcggatgaggatctcgacgagctcgagcgcgtcgcctgtccgtcggccggtgcgtgcggtgctcagttcacggccaacacgatggcgaccgtctccgaggcgatcggcctggcgctgccgtactcggctggcgcgcccgcaccttacgagatccgcgattccttctgcatgaccgccggcgagaaggtcatggagctgatatcagccaacatccggccgcgcgacatcgtgacgcgagcagcactcgagaatgccgctgcggttgtggcggcctccggcggctcgaccaacgcggccctgcatctaccagcgattgcacacgaggccggcatcaagttcgacttattcgatgtcgccgaaatcttcaaaaagacaccttatatcgcggatttgaagccgggtggccgctatgtcgccaaagacatgttcgaggctggtggcattccgctcttgatgaagacgttgctcgaccatggctatttgaacggcgactgcctcacagtcaccggccggacgatcgccgaaaacctcaaaggcgtgaagtggaatccgcaccaggacgtggtgaggccggccgaccagccgatcactgcaaccggaggtgtcgttggtttgaaaggcaatctcgcgccagagggtgcgatcgtgaaagtcgcgggcatgtcgaacttgaaattcactgggccggcccgctgcttcgatcgggaagaggatgcctttgaagccgttcagaagcggtcctatcgcgagggcgaggtcatcgtcatccgctatgagggcccgcgcggcggtcccggcatgcgggaaatgctgcagaccacggcggcgctgacggggcagggcatgggcggcaagatcgcgctcatcaccgatggccggttctcgggcgcgacgcgcggcttctgcatcggccatatcgggccggaggcggcggtcggcggaccgatcgcgctggtcgaggatggcgacatcatcgagatcgacgccgaggcgggcatcctgaacgtcaagttgagcgatgccgaactgacacaacgcaagaccaagtggacgccgcgtgaaacgcatcacacgtcaggtgcactttggaaatatgcccagcaggtgggacccgccgtggcgggggccgtcacccacccaggtggtgcgcaagagaagtattgctatgcggacatctga

SEQ ID NO: 56 - protein, 574 aa, Bradyrhizobium sp.
MDAKTDIKRRLPSRHVTEGPERAPHRSYLYAMGLTTAQIHQPFVGVASCWNEAAPCNIALMRQAQAVKKGVAHAGGTPREFCTITVTDGIAMGHDGMRSSLPSREAIADSVELTIRGHAYDALVGLAGCDKSLPGMMMAMVRLNVPSIFIYGGSILPGNFRGQQVTVQDMFEAVGKHSVGAMSDEDLDELERVACPSAGACGAQFTANTMATVSEAIGLALPYSAGAPAPYEIRDSFCMTAGEKVMELISANIRPRDIVTRAALENAAAVVAASGGSTNAALHLPAIAHEAGIKFDLFDVAEIFKKTPYIADLKPGGRYVAKDMFEAGGIPLLMKTLLDHGYLNGDCLTVTGRTIAENLKGVKWNPHQDVVRPADQPITATGGVVGLKGNLAPEGAIVKVAGMSNLKFTGPARCFDREEDAFEAVQKRSYREGEVIVIRYEGPRGGPGMREMLQTTAALTGQGMGGKIALITDGRFSGATRGFCIGHIGPEAAVGGPIALVEDGDIIEIDAEAGILNVKLSDAELTQRKTKWTPRETHHTSGALWKYAQQVGPAVAGAVTHPGGAQEKYCYADI

SEQ ID NO: 57 - DNA, 1725 bp, Bradyrhizobium japonicum
atgaacgcaaagaccaacatcaagcagaggctgccgagccgtcacgtgacggaaggccctgcgcgcgcgccccatcgctcctacttctacgccatgggtctgacgacggagcagatccaccagcccttcgtcggcgtcgcctcctgctggaacgaggccgcgccctgcaacatcgctttgatgcgccaggcgcaggcggtgaagaagggcgtcgcgcatgccggcggcacaccccgcgaattctgcaccatcaccgtgaccgacggcatcgccatgggccatgacggcatgcgctcctcgctgccgtcgcgcgaatgcatcgccgattccgtcgagctgaccgtccgcggccatgcctatgacgccctcgtcggccttgccggctgcgacaagtcgctgccgggcatgatgatggcgatggttcgcctcaacgtgccctcgatcttcatctatggcggctcgatcctgcccggcaacttccgcgggcagcaggtcaccgtgcaggacatgttcgaggccgtcggcaagcactcggtcggcgccatgtcggacgaggatctcgacgagatcgagcgcgtggcgtgcccctcggcgggtgcctgcggcgcgcagttcacggccaacaccatggcgaccgtctcggaagccatcggccttgcgctgccttactcggccggtgctccggcaccgtatgaaatccgcgacgccttctgcatgaccgcgggcgagaaggtgatggagctgatcgaccagaacatccggccgcgcgacatcgtcacccgcaaggcgctggagaatgcggccgccgtggtcgcggcctccggcggctcgaccaatgctgcgctgcacctgccggcgatcgcgcacgagtgcggcatcaagtttgacttattcgacgtcgccgaaatcttcaaaaagacaccatatgtcgcggatttgaagccgggcggccgttatgtcgccaaagacatgtttgaagtaggtggcatcccgcttctgatgaagacgctgctcgacaacggatttctccacggcgactgcattacggtcaccggtcgaacgatcgccgaaaacctcaagagcgtgaagtggaatccgcaccaggatgtggtgcacccggcagacaagccgatcaccgtcaccggtggtgtggtgggtctgaagggcaatttggcgccagaaggtgcgatcgtgaaagtcgcgggaatgtccaacctgaggtttaccggtccggcacgctgcttcgaccgggaagaggacgccttcgaggccgtccagaaccgcacataccgcgaaggcgaagtcatcgtgatccgctacgagggccccaagggcggccccggcatgcgggaaatgctccagaccaccgcggcgctgaccgggcagggcatgggcggcaagatcgcgctcatcactgacggccgcttctccggcgccacccgcggcttctgcatcggccatgtcgggccggaagccgccatcggcggcccgatcgggctgctcgaggatggcgacatcatcgagatcgacgcggtcgccggcacccttaacgtaaaattgagcgaccaggagcttgcccagcgcaagaccaaatggagcgctcgcgcgactaaccacacgacgggcgcgctctggaaatatgctcagcaggttggaccagcggtcgggggggcggtcacccatccgggcggtgcgcacgagaaacagtgctatgcggacatctag

SEQ ID NO: 58 - protein, 574 aa, Bradyrhizobium japonicum
MNAKTNIKQRLPSRHVTEGPARAPHRSYFYAMGLTTEQIHQPFVGVASCWNEAAPCNIALMRQAQAVKKGVAHAGGTPREFCTITVTDGIAMGHDGMRSSLPSRECIADSVELTVRGHAYDALVGLAGCDKSLPGMMMAMVRLNVPSIFIYGGSILPGNFRGQQVTVQDMFEAVGKHSVGAMSDEDLDEIERVACPSAGACGAQFTANTMATVSEAIGLALPYSAGAPAPYEIRDAFCMTAGEKVMELIDQNIRPRDIVTRKALENAAAVVAASGGSTNAALHLPAIAHECGIKFDLFDVAEIFKKTPYVADLKPGGRYVAKDMFEVGGIPLLMKTLLDNGFLHGDCITVTGRTIAENLKSVKWNPHQDVVHPADKPITVTGGVVGLKGNLAPEGAIVKVAGMSNLRFTGPARCFDREEDAFEAVQNRTYREGEVIVIRYEGPKGGPGMREMLQTTAALTGQGMGGKIALITDGRFSGATRGFCIGHVGPEAAIGGPIGLLEDGDIIEIDAVAGTLNVKLSDQELAQRKTKWSARATNHTTGALWKYAQQVGPAVGGAVTHPGGAHEKQCYADI

SEQ ID NO: 59 - DNA, 1725 bp, Fulvimarina pelagi
atggacgcacgcgtgatcgacaagacgaaacttccgagccgtcatgtgacggaaggaccgacccgcgcgccgcaccgctcgtatctctatgcgatgggtctctccaaggaagagatccatcagccactggtcggtgttgcctcctgctggaacgaggccgcaccctgcaatatctcgctgatgcgtcaggcgcaggtcgtaaaaaagggcgttgctgccgcacacggaacgccgcgcgaattctgcacgattaccgtcaccgacggtattgccatgggccatcagggcatgaagtcgtcgctggtctcgcgcgatctcatcgccgactcggtcgaactcaccatgcgaggccactcctacgacgcgcttgtcggtcttgccggctgcgacaagtcgctgccaggcatgatgatgtcgatggtacgcctcaacgttccctcggtcttcatctacggtggctcgattctgcccggcaccttcaagggccggcaggtgaccgtgcaggatattttcgaggcggttggccagcattccgtcggcgagatgtcggacgaggatctcgacctgatcgaacaggttgcctgcccctccgccggttcctgcggcgcccagttcacagcgaacaccatggcgacggtcgcagaggcgatcggccttgcgctgccatactcctgcggtgcgccggcgccttacgaaatccgcgaccgcttctgctacgcctcgggcgagatcgtgatggatcttctgcgccgtaacatccgtccgcgcgacatcgtcacccgcaagtcgctggagaatgcggcggccgtcgtcgcggccacgggcggctcgaccaatggcgcgctgcatctgccggcgatcgcccatgagtgtggcatcgagttcgatctcttcgacgtcgccgagatcttccgcaagacgccctacgtcgcggacctcaaaccgggtggcaaatacgtcgccaaggacatgttcgaggccggcggcattccgctcctgatgaagaccatgctggagcacggctatctccacggcgactgcatgacggtcaccggacgcacgatggccgagaacatggagaaggtcgcctggaacgcggatcaggatgtggttcgcccagccaacaatccgatcacgaagaccggcggtgttgtcggcctgaagggcaatctcgcttccgacggtgcgatcgtgaaggtcgcgggcatgaagaacctgaaattctcagggccagcgcgctgtttcgattcggaggaggattgtttcaaagcggtttcggctcgcgactataaggagggcgaggttctcgtcattcgctacgagggtccgaaaggtggccccggcatgcgcgagatgcttcagacgaccgctgcgatctacggccagggaatgggcgacaaggtcgccctcatcactgatggccgcttttccggcgccacccgcggcttctgcatcggccatgttggcccggaagcggcggtcggcggaccgatcggccttttgaaagacggcgacgtgattacgatcgacgcagtcgagggaacgctggacgttgcattgagcgaagatgaactcgccgagcgccgcaaggcttgggagccgcgcgaaaccgactatcagtcgggcgcgctctggaagtatgcccaggtggttggcacggcccgtctcggtgccgtcacccatcccggcggtgcagccgagaggcagtgctatgcggacatctaa

SEQ ID NO: 60 - protein, 574 aa, Fulvimarina pelagi
MDARVIDKTKLPSRHVTEGPTRAPHRSYLYAMGLSKEEIHQPLVGVASCWNEAAPCNISLMRQAQVVKKGVAAAHGTPREFCTITVTDGIAMGHQGMKSSLVSRDLIADSVELTMRGHSYDALVGLAGCDKSLPGMMMSMVRLNVPSVFIYGGSILPGTFKGRQVTVQDIFEAVGQHSVGEMSDEDLDLIEQVACPSAGSCGAQFTANTMATVAEAIGLALPYSCGAPAPYEIRDRFCYASGEIVMDLLRRNIRPRDIVTRKSLENAAAVVAATGGSTNGALHLPAIAHECGIEFDLFDVAEIFRKTPYVADLKPGGKYVAKDMFEAGGIPLLMKTMLEHGYLHGDCMTVTGRTMAENMEKVAWNADQDVVRPANNPITKTGGVVGLKGNLASDGAIVKVAGMKNLKFSGPARCFDSEEDCFKAVSARDYKEGEVLVIRYEGPKGGPGMREMLQTTAAIYGQGMGDKVALITDGRFSGATRGFCIGHVGPEAAVGGPIGLLKDGDVITIDAVEGTLDVALSEDELAERRKAWEPRETDYQSGALWKYAQVVGTARLGAVTHPGGAAERQCYADI

SEQ ID NO: 61 - DNA, 1815 bp, Aurantimonas sp.
ttgccgccacaaaacccgctcaccccagaggtgctgatcgggcgcggcgtcgaggcgggccatgaacagcgttgtgtacgagggggaccgatggacgcgcattcgatcgacaagaagaacctgcccagccggcatgtgaccgaggggccgtcgcgcgcgccgcaccgctcgtacctctacgccatgggtctcaccaaggaagagatccatcagccgctggtcggcgtcgcctcctgctggaacgaggccgcgccgtgcaacatctcgctgatgcgccaggcgcaggtcgtcaagaagggcgtcgcggcagcccgcggtacgccgcgcgagttctgcaccatcaccgtcaccgacggcatcgccatgggccatcagggcatgaaggcttcgctcgtctcgcgcgacctcatcgccgattcggtcgaactgaccatgcgcggccacgcctatgacgcgctggtgggtctggcaggttgcgacaagtcgcttccgggcatgatgatggcgatggttcgcctgaacgtgccgtcggtcttcatctatggcgggtcgatcctgccgggcaatttccgcggccagcaggtcaccgttcaggacatcttcgaggcggtcggcaagcattcggtcggcgagatgaacgacgccgatctcgacgagatcgagcaggtcgcctgtccgtcagccggttcctgcggcgcgcagttcaccgccaacaccatggcgaccgtcgccgaggccattggcctggcgctgccctattcctgcggtgcgccggcgccctacgagatccgcgacaagttctgctacgcctcgggcgagatcgtcatggaactcttggcccgcaacatccggccgcgcgacatcgtcacccgcaaggcgttggagaacgccgccgccgtcgtcgcggcgaccggcggatcgaccaatggcgccctgcacctgccggcgatcgcgcatgagtgcggcatcgagttcgacctgttcgacgtcgcggagatcttccgcaagacgccgtacatcgccaacctcaagccgggcggcaaatacgtcgccaaggacatgttcgaggccggcggcatcccgatgctgatgaagaccatgctggaccatggctatctgcacggcgactgcatgaccgtcaccggccgcaccattgccgagaacatggcgaaggtgacctggaacccgaaccaggacgtcatccatccggccaacacgccgatcacccagaccggcggcgtcgtcggcctgaagggtaacctcgcccaggacggcgccatcgtgaaggtcgcgggcatgaagaacctgcggttctccggcccggcgcgctgcttcgattcggaagaggaatgctacgaggccgtctccaagcgccagtacaaggaaggcgaggttctcgtcatccgctacgagggcccgcgcggcggacccggcatgcgcgagatgctgtcgaccacggcggcgctctacggccagggcatgggcgacaaggtcgcgctgatcaccgacggccggttctccggcgcgacccgcggcttctgcatcggccatgtcggtccggaagcggcgctcggcggtccgatcggcctgctgcgcgacggtgacatcatcaccatcgatgccgtcgccgggacactggacgtggacgtctcggatgacgacatgaagaagcgggccgaagactggaagccccgcgaaaccgactaccagtccggtgccatctggaaatacgcccagcaggtcggcacggcgcgcctcggcgcagtgacacatccgggcgcagcggcggaaaagcactgttatgcggacctctag

SEQ ID NO: 62 - protein, 604 aa, Aurantimonas sp.
MPPQNPLTPEVLIGRGVEAGHEQRCVRGGPMDAHSIDKKNLPSRHVTEGPSRAPHRSYLYAMGLTKEEIHQPLVGVASCWNEAAPCNISLMRQAQVVKKGVAAARGTPREFCTITVTDGIAMGHQGMKASLVSRDLIADSVELTMRGHAYDALVGLAGCDKSLPGMMMAMVRLNVPSVFIYGGSILPGNFRGQQVTVQDIFEAVGKHSVGEMNDADLDEIEQVACPSAGSCGAQFTANTMATVAEAIGLALPYSCGAPAPYEIRDKFCYASGEIVMELLARNIRPRDIVTRKALENAAAVVAATGGSTNGALHLPAIAHECGIEFDLFDVAEIFRKTPYIANLKPGGKYVAKDMFEAGGIPMLMKTMLDHGYLHGDCMTVTGRTIAENMAKVTWNPNQDVIHPANTPITQTGGVVGLKGNLAQDGAIVKVAGMKNLRFSGPARCFDSEEECYEAVSKRQYKEGEVLVIRYEGPRGGPGMREMLSTTAALYGQGMGDKVALITDGRFSGATRGFCIGHVGPEAALGGPIGLLRDGDIITIDAVAGTLDVDVSDDDMKKRAEDWKPRETDYQSGAIWKYAQQVGTARLGAVTHPGAAAEKHCYADL

SEQ ID NO: 63 - DNA, 1725 bp, Hoeflea phototrophica
atgagcgtcaaagcattcgacaagtccaagcttccaagccgctacacaacggtcggcccggcgcgggcgccgcacagatcgttcctgtatgctatggggctttcgagcgaggagattgctcagccgctcgttggcgtggcgtcgtgctggaatgaggccgcaccctgcaacatttcgctgatgcgccaggcgcaggtggtgaagaaaggcgtggcttcggcccacggcacaccgcgcgaattctgcaccatcacagtgactgatggcattgcgatgggtcaccagggcatgaaagcttccctggcgagccgcgatctgattgcagattcggtggaattgaccatgcgcggtcactgctacgatgcgatcgtgggtcttgccgggtgcgacaagtcattgccgggcatgatgatgtcgatggtgcgtctgaacgtgccctcgatcttcatctatggcggttctattttgccaggcagcttccgcggccgccagattaccattcaggacgtgttcgaggccgtggggcagcattcggttggcgatatgtcggatgaagacctgctcgaaatcgagcaggttgcctgtccgtcggcgggttcctgcggcgcgcagttcacagccaacacgatggcgactgttgccgaggcgatcggactggcgctgccctattcatgtggcgcgccggcgccttacgagatccgcgaccggttcgcttacgcggccggtgaaaaagtgatggaattgctggccaagcagatccgtccgcgcgacatcgtgacccgcaaggcgctcgaaaacgccgcggccgtcgtcgcggcttcgggcggttcgaccaacgcggcgctgcatctgccagcgattgcgcatgaatgcgggatcgagttcgatctgtttgacgtggctgagatcttcaagaagacgccctacattgccgacctcaagcccggcggcaaatatgtggccaaggacatgttcgaggctggtggcattccgctgttgatgaagaccatgcttgaacatggctatctgcacggcgattgcatgaccgtgacgggccggaccatcgccgagaacatggagaaggtctcctggaacccggagcaggatgtggtgcgcccggcggataagccgatcaccgcgaccggcggtgtggtgggcctcaagggcaatcttgcgaccgacggggcgatcgtgaaagttgccgggatggaacggctgaaattcaccggacccgcacggtgttttgattccgaggaagagtgcttcaatgcggtcacaaatcgcgactataacgaaggcgacgttcttgtgatccgctacgaggggcccaagggcggccccggtatgcgtgagatgctgtcgaccactgcggccatttatggacagggtatgggcgacaaggtggcattgatcacggatggccggttctccggtgcaacgcgcggcttctgcattggccatgtcggcccggaagcggcggaaggcgggccgatcgggctcctggaagatggcgacatcatcgagatcgatgctgttgatggtgttttgagcgtgcagctttccgatgcggaactggctgcgcgcagggaaaagtggacggcgcgcgaaaccgattatgcatcgggcgtgctgtggaaatatgcccagacggtgggggccgcgcgttacggcgccgttacccatccgggcggagcaaaagaaaagcagtgctatgcggatatctga

SEQ ID NO: 64 - protein, 574 aa, Hoeflea phototrophica
MSVKAFDKSKLPSRYTTVGPARAPHRSFLYAMGLSSEEIAQPLVGVASCWNEAAPCNISLMRQAQVVKKGVASAHGTPREFCTITVTDGIAMGHQGMKASLASRDLIADSVELTMRGHCYDAIVGLAGCDKSLPGMMMSMVRLNVPSIFIYGGSILPGSFRGRQITIQDVFEAVGQHSVGDMSDEDLLEIEQVACPSAGSCGAQFTANTMATVAEAIGLALPYSCGAPAPYEIRDRFAYAAGEKVMELLAKQIRPRDIVTRKALENAAAVVAASGGSTNAALHLPAIAHECGIEFDLFDVAEIFKKTPYIADLKPGGKYVAKDMFEAGGIPLLMKTMLEHGYLHGDCMTVTGRTIAENMEKVSWNPEQDVVRPADKPITATGGVVGLKGNLATDGAIVKVAGMERLKFTGPARCFDSEEECFNAVTNRDYNEGDVLVIRYEGPKGGPGMREMLSTTAAIYGQGMGDKVALITDGRFSGATRGFCIGHVGPEAAEGGPIGLLEDGDIIEIDAVDGVLSVQLSDAELAARREKWTARETDYASGVLWKYAQTVGAARYGAVTHPGGAKEKQCYADI

SEQ ID NO: 65 - DNA, 1761 bp, Mesorhizobium loti
atgcggcaggccgcaccgcccgcggcaaggatgagaatggacgccaaggtcatttcaaaggctaagctccctagccgccatgtgactgtcggtccggcgcgtgcgccgcaccggtcctatctctatgccatggggctttccgccgccgagatcgcgcagccgctggtcggcgtcgcctcctgctggaacgaagccgcgccctgcaacatctcgctgatgcgccaggcgcaggtggtcaagaagggtgtcgccgccgccaacggcacaccgcgcgaattctgcaccatcaccgtcaccgacggcatcgccatgggccaccagggcatgaagtcgtcgctggtgtcgcgcgaggtcatcgccgattcggtcgagctcacgatgcgtggccattgctacgatgcgctggtcggcctcgccggctgcgacaagtcgctgcccggcatgatgatggccatggtgcggctcaacgtgccgtcgatcttcatctatggcggttcgatcctgcccggcagctatcgcggccgtcagattaccgtgcaggacgtgttcgaggcggtcggccagcactccgtcggcacgatcggcgacgccgagctgctcgagatcgagcaggcggcctgtccgtcggccggctcctgcggcgcccagttcaccgccaacaccatggcaaccgtcgccgaggcgatcggtctggcgctgccctattcctgcggcgcgccggcgccttacgaaatgcgcgaccgcttcaatttcgcctccggcgaaaagatcatggagctgatcgccaaaaacatccggccgcgcgacatcatcacgctgaaggcgctggagaacgcggcgaccgtggtttccgccaccggcggttcgaccaatgcggcgctgcatctgccggcgatcgcgcatgaggcgggcatcaaattcgatctcttcgatgtcgcaaggattttcgagaagacgccctacatcgccgacctcaagcctggcggcaaatatgtcgcaaaggacatgttcgaggccggcggcattccgctgttgatgaagacgctgctcgaccacggctatctgcatggcgattgcctgacggtgactggccgcactttggccgaaaacatggagcacgttgcctggaatgaacaccaggatgtggtccgcccggccaacagaccaattacccaaaccggcggtgtcgtgggcttgaagggaaaccttgcccccgaaggcgcgatcgtgaaagtcgcgggcatgacggagttgaaattctccggcccggcgcgctgcttcgattcggaagaggaatgtttcgaggcggtgacgcaacgcaactacagggaaggcgaggttctcgtcattcgctacgaagggccgcgcggtggtcccggcatgcgcgagatgctgtcgacgacggcagcgctctacggccagggcatgggcggcaaggtggcgctgatcaccgacggccgcttctcgggcgcgacgcgcggcttctgcatcggccatgtcgggccggaagcggcggtgggcggcccgatcggcctcatccgggatggcgacgtgatttcgatcgacgccgtgaacggcacgatcgaagtggcgctgtcggatagcgaactggcggcgcgggccaagacatggaaggcgcgcacgaccgactatcagtcgggcgcgatatggaaatacgcacagacggtcgggtctgccagggatggcgcggtcacccatccgggtggtgcgaaagaaacacactgctatgcggatatctga

SEQ ID NO: 66 - protein, 586 aa, Mesorhizobium loti
MRQAAPPAARMRMDAKVISKAKLPSRHVTVGPARAPHRSYLYAMGLSAAEIAQPLVGVASCWNEAAPCNISLMRQAQVVKKGVAAANGTPREFCTITVTDGIAMGHQGMKSSLVSREVIADSVELTMRGHCYDALVGLAGCDKSLPGMMMAMVRLNVPSIFIYGGSILPGSYRGRQITVQDVFEAVGQHSVGTIGDAELLEIEQAACPSAGSCGAQFTANTMATVAEAIGLALPYSCGAPAPYEMRDRFNFASGEKIMELIAKNIRPRDIITLKALENAATVVSATGGSTNAALHLPAIAHEAGIKFDLFDVARIFEKTPYIADLKPGGKYVAKDMFEAGGIPLLMKTLLDHGYLHGDCLTVTGRTLAENMEHVAWNEHQDVVRPANRPITQTGGVVGLKGNLAPEGAIVKVAGMTELKFSGPARCFDSEEECFEAVTQRNYREGEVLVIRYEGPRGGPGMREMLSTTAALYGQGMGGKVALITDGRFSGATRGFCIGHVGPEAAVGGPIGLIRDGDVISIDAVNGTIEVALSDSELAARAKTWKARTTDYQSGAIWKYAQTVGSARDGAVTHPGGAKETHCYADI

SEQ ID NO: 67 - DNA, 1728 bp, Mesorhizobium sp.
atgatggacgctcgtgcgatatcgaaggaaaagctgcccagccgctacgttaccgtagggccggcgcgggcgccgcacaggtcttatctttacgcgatggggctctcggcggaagagatcgctcagccgctggtcggcgtggcgacgtgctggaacgaggctgcgccctgcaacatctcgctgatgcgccaggcgcaagtggtgaaaaagggcgtcgcggcagccaaaggcacgccccgcgagttcacaacgattaccgttactgatggcatcgccatgggccaccagggcatgaaggcgtcgctggcctcgcgcgaggtaatcgcggattctgtggaactcaccatgcgcggccattgctatgacgcgcttgtcggccttgcgggttgtgacaaatccctgccggggatgatgatggccatggtgcgcctcaatgtgccgtcggtcttcatctatggcggttcgatcctgcctggcacctggcgcgggcggcagatcaccgttcaagacgttttcgaggcggtcggccagcattcggttggctccatttccgacgacgagctgatggaaatcgagcaagccgcttgtccctcggccggttcctgcggcgctcaattcacggccaacaccatggcgaccgttgccgaggcgattgggctggcgcttccttattcctgcggtgcgcctgcgccttacgagatgcgcgatcgcttcaactatgccgccggcgagaaggtgatggaactggtggccaagcagatacggccgcgtgacatcgtgacccggaaggcgcttgaaaacgccgcggccgtggttgccgcgtcggggggctccaccaatgcggcattgcatttgccggccatcgctcatgaagccggaattgaattcgaccttttcgacgtcgcggaagtgttcaagagaacaccctatgtcgccgatttgaagccgggcggcaaatatgtcgccaaggacatgttcgaggcgggcggcattccgctgctcatgaagaccttgctcgaccatggctatctgcatggcgactgcatgaccgtcaccggccgcacgcttgcggagaacatggaacgcgtcgagtggaacgatgcgcaggacgtggtttatccggctgacaagccgctgagcccgacgggcggcgtcgtgggccttaaaggcaatctcgcgccggatggggcaatcgtgaaggttgcaggcatgaagaacctgcgcttctccggccccgcgcgctgcttcgattcggaagaggaatgcttcgccgcggtttccgagcgccgctataaggaaggcgaggtgctggtgatccgctacgaaggtccgaaaggcgggccgggcatgcgtgaaatgctcgccaccaccgcggccctttacgggcagggcatgggcgacaaggtggcgctgatcacggacgggcggttttcaggcgcgacccgcggcttctgtatcggtcatgtcgggccggaagcagcagtgggcgggccgatagggcttctcaatgacggcgacatcataaccatcgatgcggtggcaggcacgatcgacgtggcgctcggcgaagcggaactggccgaacgccgcgctgcctggaggccgcgcgaaagcgaatatcggtccggcgcgatctggaaatacgcgcagggcgtgggcccggcgcggtatggcgcggtgacgcatcccggcgcccagaaagaaacgcactgctatgcggatatctga

SEQ ID NO: 68 - protein, 575 aa, Mesorhizobium sp.
MMDARAISKEKLPSRYVTVGPARAPHRSYLYAMGLSAEEIAQPLVGVATCWNEAAPCNISLMRQAQVVKKGVAAAKGTPREFTTITVTDGIAMGHQGMKASLASREVIADSVELTMRGHCYDALVGLAGCDKSLPGMMMAMVRLNVPSVFIYGGSILPGTWRGRQITVQDVFEAVGQHSVGSISDDELMEIEQAACPSAGSCGAQFTANTMATVAEAIGLALPYSCGAPAPYEMRDRFNYAAGEKVMELVAKQIRPRDIVTRKALENAAAVVAASGGSTNAALHLPAIAHEAGIEFDLFDVAEVFKRTPYVADLKPGGKYVAKDMFEAGGIPLLMKTLLDHGYLHGDCMTVTGRTLAENMERVEWNDAQDVVYPADKPLSPTGGVVGLKGNLAPDGAIVKVAGMKNLRFSGPARCFDSEEECFAAVSERRYKEGEVLVIRYEGPKGGPGMREMLATTAALYGQGMGDKVALITDGRFSGATRGFCIGHVGPEAAVGGPIGLLNDGDIITIDAVAGTIDVALGEAELAERRAAWRPRESEYRSGAIWKYAQGVGPARYGAVTHPGAQKETHCYADI

SEQ ID NO: 69 - DNA, 1731 bp, Parvibaculum lavamentivorans
atggacgccaagacattcgacaaatcgaaactgccgagccgccacgtcacggtcgggccggagcgcgcgccgcaccggtcctactactatgcgatgggcctcaccgaggaagagatcaatcagcccttcgtcggcgtggcgacctgctggaacgaggcggctccctgcaacatcgcgttgatgcgtcaggcgcagtcggtgaagaagggtgtcaaggccgccgccggcacgccccgcgaattctgcaccatcacggtgacggacggcatcgccatgggccaccagggcatgaaatcctcgctcgccagccgcgacgtgatcgcggattcggtcgagctcaccatgcgcggtcattgctacgacgcgctggtcggccttgccggctgcgacaagtcgctgccgggcatgatgatgtcgatggttcgtctcaacgtcccctccgtcttcatgtatggcggctcgatcctgccgggccatttcaagggcaaggacgtcaccgtggtcgacgtcttcgaggcggtcggccagcactcggcgggcaacatggaagacgaagagctgcatgcgctcgaatgcgtcgcctgtccctccgccggcgcctgcggcggccagttcacggccaacaccatggcctgcgtttcggaagccatgggcctcgcgctgccgggttcggcgggcgcgcctgcgccttatgagagccgcgacgaatatgcggaagcctcgggccgcgccgtcatgcacctcctcgccaacaacatccggccgcgcgacatcgtcacgcgcaaggcgctcgagaatgccgccgtcatcgtcgcggcgacgggcggttcgaccaatggcgggcttcatctcccggccatcgcgcatgaagcgggcatcgatttcgacctgatggaagtcgccgaaatcttcaagaagacgccctacatcaccgacctgaagcccggcggcaattacgtcgcgaaggatcttcacgaggcgggcggcgtttcgatggtcctcaaggtgctgctcgatggcggctatctccacggcgattgcctcaccgtcaccggccagtcgctcgcagacaacctcaaggacgtgaagttcaacccggaccagaaggtcgtctatccgctgtccaatccgctctcgcccaccggcggcgttgtcgggttgcagggctcgctcgcgccggatggcgccatcgtcaaggtcgcgggcatggagaaggatcatctccgtttctccggtccggcgcgttgcttcgacagcgaagaggaatgcttcgaggcggtcgacaaacgtcagtacaaggaaggtgaggttctcgtcatccgctacgagggaccgaagggtggccccggcatgcgcgaaatgctctccaccaccgccgcgctttacggccagggcatgggcgacaaggtcgcgctcatcaccgatggccgcttctccggcggcacgcgcggtttctgcatcggccatgtcggcccggaagccgccgtcggcggccccatcgcgctgatcgaggatggcgacatcatcaccatcgacgcggagaacggcaccatcgatctcgaagtcgacgaagccgtgctcgaaaagcgccgcgcgaactggaagccccgggagaccatgtacgcctccggcgcgctgtggaaatacgcgcagctcgtcggcaccgcccgcaagggcgccgtcacccatccgggcggcaaggcggagaaacatgtctatgcggatatctga

SEQ ID NO: 70 - protein, 576 aa, Parvibaculum lavamentivorans
MDAKTFDKSKLPSRHVTVGPERAPHRSYYYAMGLTEEEINQPFVGVATCWNEAAPCNIALMRQAQSVKKGVKAAAGTPREFCTITVTDGIAMGHQGMKSSLASRDVIADSVELTMRGHCYDALVGLAGCDKSLPGMMMSMVRLNVPSVFMYGGSILPGHFKGKDVTVVDVFEAVGQHSAGNMEDEELHALECVACPSAGACGGQFTANTMACVSEAMGLALPGSAGAPAPYESRDEYAEASGRAVMHLLANNIRPRDIVTRKALENAAVIVAATGGSTNGGLHLPAIAHEAGIDFDLMEVAEIFKKTPYITDLKPGGNYVAKDLHEAGGVSMVLKVLLDGGYLHGDCLTVTGQSLADNLKDVKFNPDQKVVYPLSNPLSPTGGVVGLQGSLAPDGAIVKVAGMEKDHLRFSGPARCFDSEEECFEAVDKRQYKEGEVLVIRYEGPKGGPGMREMLSTTAALYGQGMGDKVALITDGRFSGGTRGFCIGHVGPEAAVGGPIALIEDGDIITIDAENGTIDLEVDEAVLEKRRANWKPRETMYASGALWKYAQLVGTARKGAVTHPGGKAEKHVYADI

SEQ ID NO: 71 - DNA, 1734 bp, Loktanella vestfoldensis
atgcccagcaaccgtgtcgacaaatccaaattgcccagccgccacgtgactgaaggcccgtctcgcgcgccgcaccggtcctatttttatgcgatgggcctggacgaacatgagatcgcacagccttgggtcggtgtcgccacctgctggaacgaagcagccccctgcaacatcacgctgaaccggcaggcccaagccgtcaaggtcggcgtcaagaacgccaaaggcacgccgcgcgaatttaccacaatcaccgtcaccgatggcatcgccatgggccatgaagggatgcggtcgtcactcgcatcacgcgaagcgattgccgataccgttgaactgacgatgcgcggccattgctatgacgcgctggtcggtctggccggttgcgacaaatccttgcccgggatgatgatggcgatggtgcggctgaacgtgccgtcggtgttcatctatggcggctcaatcctgccgggccggttaaacgggcaggacgtgaccgtccaagacgtgttcgaagcggtgggcaagcatcaggccggtaatatgaccgatgcggagctcgaaatccttgaacgcgtcgcctgcccctctgctggggcttgtggtggacaattcaccgccaacaccatggcctgcgtgtccgaagcaatcggtctggcgctgctcaattcctctggcgcgcctgcgccctacgaatcgcgcgatcaatatggtgtcgcttcgggcgaggccgtgatgaacctgatcgccaagaacatccgcgcgcgcgatatcgtcacgcgcaaatcactggaaaacgcggcacggatcgtggcctgcaccggcgggtccaccaatgccggtctgcacctgcctgcgatcgccgccgaggctggcattgattttgatctgtccgatgtctgcgagattttccgcgatacgccctatttcgtcgatctcaaaccgggcggcaaatatgtggccaaggatctttacgaggcaggcggcgtgcctgtcgtgctgaaagaactgcgcaaggccggtctgatccacgaagattgcatgacagcgacaggccgcgtgatcggtgaagaactggacatgatcaagggtgaggcggataaccgcgtcatctattccgtcgccaatccgatcacgaaaaccggcggtgttgtcggcctgaaaggcaaccttgcccccgaaggcgccatcgtcaaggtcgcgggcatgtccgaggaagaacagatatttaccggccctgcccgcgtgttcgaatgcgaagaagacgcgttcgaggccgtaaaagcccgccaatatgaagaaggcgaagtcatcgttatccgcaacgaaggccctgcaggcggccccggtatgcgcgaaatgctgtccaccaccgccgctttgtcgggccaaggcatgggcaaaaaggtcgcgctgatcaccgacggccgcttttcaggtgcgacacgcgggttctgcgtgggtcacgtcggcccagaggccgcgcagggcggccccatcgcgctgttgaaagacggcgacatgatcacgctgaacgcgcgcaccggcgaattgtcggtggcgctgaccgatgcagaactggccgaacggcgcaaaacctgggctggcccgcgcgaaactatctatgcctcgggagccttgtggaaatatgcacagctggtcggatcgacccgtctgggcgcattgacccatccaggtgccaagggcgaaaaacacatctatatggacctgtaa

SEQ ID NO: 72 - protein, 577 aa, Loktanella vestfoldensis
MPSNRVDKSKLPSRHVTEGPSRAPHRSYFYAMGLDEHEIAQPWVGVATCWNEAAPCNITLNRQAQAVKVGVKNAKGTPREFTTITVTDGIAMGHEGMRSSLASREAIADTVELTMRGHCYDALVGLAGCDKSLPGMMMAMVRLNVPSVFIYGGSILPGRLNGQDVTVQDVFEAVGKHQAGNMTDAELEILERVACPSAGACGGQFTANTMACVSEAIGLALLNSSGAPAPYESRDQYGVASGEAVMNLIAKNIRARDIVTRKSLENAARIVACTGGSTNAGLHLPAIAAEAGIDFDLSDVCEIFRDTPYFVDLKPGGKYVAKDLYEAGGVPVVLKELRKAGLIHEDCMTATGRVIGEELDMIKGEADNRVIYSVANPITKTGGVVGLKGNLAPEGAIVKVAGMSEEEQIFTGPARVFECEEDAFEAVKARQYEEGEVIVIRNEGPAGGPGMREMLSTTAALSGQGMGKKVALITDGRFSGATRGFCVGHVGPEAAQGGPIALLKDGDMITLNARTGELSVALTDAELAERRKTWAGPRETIYASGALWKYAQLVGSTRLGALTHPGAKGEKHIYMDL

SEQ ID NO: 73 - DNA, 1734 bp, Roseobacter sp.
atgcccaaagatcaggtcaataagacacacctgcccagccgccatgtgaccgaaggcccatcgcgcgcgccgcaccggtcgtatttttacgccatgggtctggatgaagaagcgatcaagcaaccttgggttggtgtcgcgacctgctggaacgaagcggccccttgcaacatcgccctgaaccgtcaggcgcagtcggtcaagctgggtgtgaaaaaggcgatgggcacgccgcgcgaatttacaacgattactgtcaccgacggcattgcgatggggcatgaagggatgcgctcttcgctggcgtcacgcgaagcaattaccgatacggttgagctgacgatgcgcggccactgctatgatgcgctggtcggtctggccggttgcgacaaatccctgcccggtatgatgatggcgatggtccgtctgaacgtgccgtccgtctttatctatggcgggtccattctgccgggtcgtctggatggcaaggacgtgactgttcaggacgtgttcgaggctgtgggtaaacaccaagcgggcaatatgactgatgcggaactggaagtgctggaacgtgtagcgtgtccatctgctggcgcttgcggtggtcagtttacggccaatacgatggcttgtgtgtccgaagcgattggtctggccctgatgaattcttccggtgcccctgccccttatgaaagccgcgaccagtatggcattgcatcgggtgaagcggtcatgaacctgattgaaaagaacatccgcgcccgtgatgttgtcacccgcaagtcgcttgagaacgccgcgcgcgttgtggcctgtaccggtgggtccaccaatgccggtctacacctgccggccattgcgcatgaggctggcattgatttcgacctttttgatgtctgcgacatcttccgtgatacgccttattttgtcgatctgaaaccgggtggtcaatatgtggccaaagacctttacgaggctggcggcgtacccgtcgtgctgaaagaactgcgcaaggccggtctgatccacgaggagtgcatgacagcatcaggccggaccatgggcgaagagctggatatgatcaaaggcgaggcggacaataaggtgatctattctatcgaaaacccgctgacaccaaccggtggcgttgttggtttgaagggtaatcttgcccccgaaggtgcgattgtgaaggtcgcggggatgaatacgcaagaacagtcttttacaggtcccgcccgttgctttgaaagcgaagaagatgcgtttgaggctgtgaaagcccgccaatacgaagaaggcgaagtgctggtgatccgcaatgaaggccccgccggtggccccggtatgcgcgagatgctggcgacgactgccgcactgtccggccaaggcatgggcaaaaaggtcgcgctgatcacggatggccgcttttctggtgcgacacgcgggttctgtgtgggtcatgtggggccagaggccgcgcacggtggcccgataggcctgttgcagaacggcgatgtcatcacaatcaacgctgtcactggtgaactgtcagtcgatctgagtgacgaagaactggcgacgcgcaaggcgaattggaaaggcccgaaagagacgatctatgcatccggtgctttgtggaaatacgcgcaacttgtgggtggtgcgcgtttgggtgcggtgacgcatccgggtgcgaagtctgaaaaacacatttacatggacctctga

SEQ ID NO: 74 - protein, 577 aa, Roseobacter sp.
MPKDQVNKTHLPSRHVTEGPSRAPHRSYFYAMGLDEEAIKQPWVGVATCWNEAAPCNIALNRQAQSVKLGVKKAMGTPREFTTITVTDGIAMGHEGMRSSLASREAITDTVELTMRGHCYDALVGLAGCDKSLPGMMMAMVRLNVPSVFIYGGSILPGRLDGKDVTVQDVFEAVGKHQAGNMTDAELEVLERVACPSAGACGGQFTANTMACVSEAIGLALMNSSGAPAPYESRDQYGIASGEAVMNLIEKNIRARDVVTRKSLENAARVVACTGGSTNAGLHLPAIAHEAGIDFDLFDVCDIFRDTPYFVDLKPGGQYVAKDLYEAGGVPVVLKELRKAGLIHEECMTASGRTMGEELDMIKGEADNKVIYSIENPLTPTGGVVGLKGNLAPEGAIVKVAGMNTQEQSFTGPARCFESEEDAFEAVKARQYEEGEVLVIRNEGPAGGPGMREMLATTAALSGQGMGKKVALITDGRFSGATRGFCVGHVGPEAAHGGPIGLLQNGDVITINAVTGELSVDLSDEELATRKANWKGPKETIYASGALWKYAQLVGGARLGAVTHPGAKSEKHIYMDL

SEQ ID NO: 75 - DNA, 1734 bp, Dinoroseobacter shibae
atgctcaagcgttcgttcgacaagtccaagctgcccagccgtcacgtcaccgaaggcccttcgcgcgcgccgcatcggtcctattactatgccatgggcatgaccgaggaagagatccaccagccgctggtcggggtcgccacatgctggaacgaggccgcgccctgcaacatcgcgctcagccgccaggcccaggcggtgaagatgggggtcaagcaggcctccggcacgccacgagaattcaccacgatcaccgtgaccgacgggatcgccatgggccacgagggcatgcggtcctcgctggcctcccgcgaggcgattgccgatacggtcgaattgaccatgcgcggccattgctatgacgcgattgtgggtctggcgggctgcgacaagtccctgccggggatgatgatggccatggtgcggctcaacgtgccgtcggttttcatttatggcggctcgatcctgccgggtcggttgaacggcgaggacgtgacggttcaggacgtgttcgaggccgtgggcaagcaccaggccgggaactacaccgatgcagagctggaagtgctggagcgggtggcttgtccgtccgcaggggcctgtggcggtcagttcaccgccaataccatggcctgcgtgtccgaggcgatcggtctggcgctgccgaattccgcgggcgcacccgcgccctacgagagccgcgaccagtatggcgaggcgtcgggccgcgcggtcatggacctgatcgagaaaggcatccgcgcgcgggacatcgtgacccggaagtcgctggagaatgccgcgcggatcgtggcctgcaccggcgggtcgacgaatgccggtctgcacctgcctgcgattgcccatgaggccgggatcgaattcaccttgcaggatgtctgcgacatcttccgagacacgccctatttcgtggacctcaagccgggcggcaaatacgttgccaaggacatgtacgaagcgggcggcgtgcccgtggtgatgcgcgagctgcgccgcgcgggcctgatccacgaggattgcatgaccgtgaccggctattccatcggcgaggagctcgacaaggtcacgctcgaagccgatggccgggtgatctatccggtcgacacgccgctctcgaccacgggcggggttgtcggtctcgagggtaacctggcgcccgaaggtgccatcgtgaagatcgcgggcatgagcgacgaccagttggtcttcaccggcccggcgcgcgtgttcgaatgcgaagaggacgccttcgaggcggttcagaaccgcgcttacgcggaaggcgacgtcttcgtgatccgcaacgagggtcccgcaggcggtcccggcatgcgcgagatgctggccaccacggcggcgctctcgggtcagggcatgggcaagaaggtggcgctgatcaccgatggccggttctccggggccacgcgcggcttctgcgtcggccatgtgggccccgaagcggcccatggcggccccatcgcgatgctcaaggacggcgacatgatcaccatcgacgcgctgaagggcgagctgtccgtcgcgctgagcgaggatgagcttgccgcgcgaaaagatgcctggagcggcccgcgggagacgatctatgcctcgggtgcgttgtggaaatatgcgcagctggttggcggcgcacgcctgggggcagtcacccatcccggagccaaggatgaaaaacacatctacgccgatctctga

SEQ ID NO: 76 - protein, 577 aa, Dinoroseobacter shibae
MLKRSFDKSKLPSRHVTEGPSRAPHRSYYYAMGMTEEEIHQPLVGVATCWNEAAPCNIALSRQAQAVKMGVKQASGTPREFTTITVTDGIAMGHEGMRSSLASREAIADTVELTMRGHCYDAIVGLAGCDKSLPGMMMAMVRLNVPSVFIYGGSILPGRLNGEDVTVQDVFEAVGKHQAGNYTDAELEVLERVACPSAGACGGQFTANTMACVSEAIGLALPNSAGAPAPYESRDQYGEASGRAVMDLIEKGIRARDIVTRKSLENAARIVACTGGSTNAGLHLPAIAHEAGIEFTLQDVCDIFRDTPYFVDLKPGGKYVAKDMYEAGGVPVVMRELRRAGLIHEDCMTVTGYSIGEELDKVTLEADGRVIYPVDTPLSTTGGVVGLEGNLAPEGAIVKIAGMSDDQLVFTGPARVFECEEDAFEAVQNRAYAEGDVFVIRNEGPAGGPGMREMLATTAALSGQGMGKKVALITDGRFSGATRGFCVGHVGPEAAHGGPIAMLKDGDMITIDALKGELSVALSEDELAARKDAWSGPRETIYASGALWKYAQLVGGARLGAVTHPGAKDEKHIYADL

SEQ ID NO: 77 - DNA, 1728 bp, Roseovarius nubinhibens
atgaccaaattcgacaaagcaaaattgcccagccgccatgtgaccgaaggcccggcgcgtgcgccgcaccggtcctacatgtatgcgatggggcttcaggaagaagaaatccatcagcctctggtcggcgtggcgacctgctggaacgaggcggcgccgtgcaacatttcgctcaaccggcaggcgcaatcggtcaagatgggcgtcaaggaagcgggcggcacgccgcgcgagtttaccaccatcaccgtgaccgacggcatcgccatgggccatgagggcatgcgcagctcgctcgcgtcgcgcgaggcgattgccgacactgtcgagctcaccatgcgcggccattgctatgatgcgctcgtcggtctggcgggctgtgacaagtcgctgccggggatgatgatggcgatggtgcggctcaacacgccgtcggtcttcatctatggcggctcgatcatgccgggccggttccagggccgtgacgtgaccgtgcaggacgtgttcgaggccgtcggccgccatcaggcaggggccaattcggacgaagagctgcgggcgctggaaaaggtggcctgcccgtcggccggggcctgtggcggccagttcaccgccaacaccatggcctgtgtctctgaagcgatcggtctggcgctgcccaactcggcgggcgcgcccgcgccctatgaaagccgcgatcaatatggcaccgcctctggtgcggcggtcatgacgcttttggaaaagaacatccgggcgcgcgacatcgtcacgctcaagagccttgagaatgccgcgcgggtcgtggcctgtaccggtgggtcgaccaatgccggtctgcacctgcccgcgattgcgcatgaggcggggctcgagtttttcctcgatgacgtctgccagatcttcaaggacacgccctatttcgtcgatctcaaaccgggcgggcaatatgtcgccaaggacctctatgaggcgggcggcgtgccggtggtgatgaaggagctgcgcaaggcggggctcatccacgaagattgcatgaccgtcaccgggcggaccattggcgaagagatcgacatcgtcgagcgcgaggccgatggccgggtgatctatcccgtcgagaagccgatcaccaagaccggcggcgtcgtgggcctcaagggcaatcttgccccgcagggcgccatcgtgaaggtcgcgggtatgagcgaggaagagcaagtcttctcgggccccgcgcgggtttttgaatgcgaagaggacgcctttgaggcggtcaaggcgcgcagctacaaggagggcgaggttctcgtcatccgcaacgagggccccgcaggcggtccgggcatgcgcgagatgctcgccaccacggcggcgctgtcggggcagggcatgggcaagaaggtcgcgctcatcaccgatggccggttctcgggcgcgacgcgtggcttctgcgtcggccatgtcggaccggaatcggcccatggcggcccgattgccctggtccaggatggcgatgtgatcaccatcaacgcgatcaccggcgagctcagcgtggcgctcagcgatgaggatctgacggcccgcaaggaggcctggaaaggcccgcgcgagacgatctattccagcggcgcgctgtggaaatacgcccagctcgtgggcgagacctacaagggcgctgtgacccaccccggtgccgaagcggagaagcatgtctatatggatctctaa

SEQ ID NO: 78 - protein, 575 aa, Roseovarius nubinhibens
MTKFDKAKLPSRHVTEGPARAPHRSYMYAMGLQEEEIHQPLVGVATCWNEAAPCNISLNRQAQSVKMGVKEAGGTPREFTTITVTDGIAMGHEGMRSSLASREAIADTVELTMRGHCYDALVGLAGCDKSLPGMMMAMVRLNTPSVFIYGGSIMPGRFQGRDVTVQDVFEAVGRHQAGANSDEELRALEKVACPSAGACGGQFTANTMACVSEAIGLALPNSAGAPAPYESRDQYGTASGAAVMTLLEKNIRARDIVTLKSLENAARVVACTGGSTNAGLHLPAIAHEAGLEFFLDDVCQIFKDTPYFVDLKPGGQYVAKDLYEAGGVPVVMKELRKAGLIHEDCMTVTGRTIGEEIDIVEREADGRVIYPVEKPITKTGGVVGLKGNLAPQGAIVKVAGMSEEEQVFSGPARVFECEEDAFEAVKARSYKEGEVLVIRNEGPAGGPGMREMLATTAALSGQGMGKKVALITDGRFSGATRGFCVGHVGPESAHGGPIALVQDGDVITINAITGELSVALSDEDLTARKEAWKGPRETIYSSGALWKYAQLVGETYKGAVTHPGAEAEKHVYMDL

SEQ ID NO: 79 - DNA, 1734 bp, Sagittula stellata
gtgctcaagcgtccgtttgacaagaccaaactgcccagccgtcacgtcactgagggtcccgcccgcgcgccgcatcgctccttcatgtacgccatggggttgagcgaagaagagatccatcagcctcttatcggtgtcgcgacctgctggaacgaggccgcgccctgcaacatctcgctgagccggcaggcgcaggcggtgaagctgggtgtcaaggaagcctccggcacgccgcgcgaattcaccaccatcaccgtgaccgacggcatcgcgatgggccacgaggggatgcgtgcttcgctggcctctcgcgaagccatcgccgatacggtcgagctgacgatgcgcggccactgctacgacgcgcttgtggggcttgcgggctgcgacaagtcactgcccgggatgatgatggcaatggtgcggctcaatgtgccgtcggtcttcatctatggcgggtcgatcatgccgggcaagttccagggccgcgacatcaccgttcaggacgtgttcgaggccgtgggcaagcaccaggcgggcgccaactccgacgaggaactgcgcgccatcgagaaggcggcctgtccctcggccggggcctgcggcggccagttcaccgccaacaccatggcctgcgtgtccgaggccatcggccttgcgttgttgaattcttccggcgcgccagcgccttacgaaagccgcgaccagtacggcaccgcgtccggcatcgccgtgatgaacctgctggagcgcaacatccgcgcccgcgacatcgtcacgatgaagtctctggaaaacgcggcgcgggtggtcgcctgcaccggcggttcgaccaacgccggtctgcacctgcccgccatcgcacatgaggcagggctggaattcttcctagacgacgtgtgcgagatcttccgcgacacaccctatttcgtcgacctgaagcccggcggcaactatgtggccaaggacctttacgaggtcggtggcgttccggttgtgatgaaggagctgcgcgaggcgggcctgatccacgaggactgcatcaccgcatcggggcgatcaatgggagaggaactcgacctgatcgagcgcgaggccgatggcaaagtcatctatcccatagaaacgccgatcaccaagaccggcggcgtcgtgggcctgaagggcaacctcgccccgcagggcgccatcgtgaaggtcgcgggaatcgcggcggaggaccaggtgttcaccggtcccgcgcgtgtcttcgaatgcgaggaagactgctttgaagcggtcaagatgcgcgcctacaaggagggcgaggtgctggtcatccgcaacgagggccccgcaggcggccccggcatgcgcgagatgctggctaccaccgccgccctgtccgggcagggtatgggcaagaaggttgcactgatcaccgacggccgcttttccggtgcgacgcgcggtttctgcgtgggccacgtcggcccagaggcggcgcacggcgggccgatcgcgctggtggaaaccggcgatgtcatcaccatcaacgcacagaccggagagctgtccgtggacctgacggacgagcaactggcggcccgcaaggacgcttggagcgggccgcgggacacgatctatgcctccgggtcgctgtggaaatatgcgcaactcgttggggagacatacaaaggcgccgtcacccatccaggtggcaaggcggagaaacacgtctacgccgatctctga

SEQ ID NO: 80 - protein, 577 aa, Sagittula stellata
MLKRPFDKTKLPSRHVTEGPARAPHRSFMYAMGLSEEEIHQPLIGVATCWNEAAPCNISLSRQAQAVKLGVKEASGTPREFTTITVTDGIAMGHEGMRASLASREAIADTVELTMRGHCYDALVGLAGCDKSLPGMMMAMVRLNVPSVFIYGGSIMPGKFQGRDITVQDVFEAVGKHQAGANSDEELRAIEKAACPSAGACGGQFTANTMACVSEAIGLALLNSSGAPAPYESRDQYGTASGIAVMNLLERNIRARDIVTMKSLENAARVVACTGGSTNAGLHLPAIAHEAGLEFFLDDVCEIFRDTPYFVDLKPGGNYVAKDLYEVGGVPVVMKELREAGLIHEDCITASGRSMGEELDLIEREADGKVIYPIETPITKTGGVVGLKGNLAPQGAIVKVAGIAAEDQVFTGPARVFECEEDCFEAVKMRAYKEGEVLVIRNEGPAGGPGMREMLATTAALSGQGMGKKVALITDGRFSGATRGFCVGHVGPEAAHGGPIALVETGDVITINAQTGELSVDLTDEQLAARKDAWSGPRDTIYASGSLWKYAQLVGETYKGAVTHPGGKAEKHVYADL

SEQ ID NO: 81 - DNA, 1758 bp, Roseobacter sp.
atgaccaaattcgacaaatccaaactgcccagccgttacgtgaccgaaggaccggcccgcgcgccgcatcggtcctattactatgccatgggcatgaccgaggccgagatccatcagccgctggtcggcgtggcgacctgctggaacgaggcggcgccgtgcaacatcgcgctcaaccgtcaggcgcaggccgtcaagggcggcgtcaaggaagcgcatggcagcccgcgtgaattcaccacgatcaccgtgaccgacgggatcgccatgggccatgaaggcatgcgcagctcgcttgccagccgcgaggcgattgccgacactgtcgagctgaccatgcggggccattgctatgacgcgcttgtgggtcttgcgggctgtgacaagtcgctgccgggcatgatgatggcgatggtgcggctcaatgtgccgtcagtgttcatctatggcgggtcgatcctgccgggcaaggcgcctcaggtgaacgaaatccccgaagaattccgcaaccgcgacctgacggtgcaggatatgttcgaagcggtcggctggcaccagaacgagcagatgtccgacaaggcgctcgatatgctcgaacgcgtcgcctgcccctcggcgggcgcttgcggcgggcagttcaccgccaacacaatggcctgcgtctccgaggcgatcggccttgcgctgatgaacagctcgggcatgcccgcgccctacgaatcccgcgaccaatatgccgaggcgtcgggccgcgcggtcatgacccttctggaaaagaacatccgtgcgcgggacgtggtcaccctccaaagcctgcagaacgccgcgcgcgtcgtggcctgcaccggcggctccaccaatgcgggcctgcaccttccggccatcgcccatgaggcggggatcgacttcttcctcgaagatgtctgcgagattttccgcgacacgccctatttcgtcgatctcaagcccggtggtcagtatgtggccaaggatctctatgatgcgggcgggattcccgtcgtgatgaaagagctgcgcaaggcggggctgatccacgaggattgcatcaccgcctcgggccgctccatcggcgaagagcttgacctgatcgaacgcgaggccgatggccgcgtgatctatccgatcgaaaagccgatcaccaagaccggcggtgtcgtcggcctcaagggcaatcttgcgccgcaaggcgccatcgtgaaggtcgcgggcatcgcccccgagcatcaggtcttcaccggcccggcgcgcgtgttcgaatgcgaagaggacgcgttcgaggcggtcaaggcgcgccaatacaaggaaggcgaggtcatcgtgatccgcaacgaaggccccgcaggcggccccggcatgcgcgagatgctgtccacgaccgccgcgctgtccgggcagggcatgggcaagaaggttgcgcttatcaccgatgggcgcttttcgggcgccacacgcgggttctgtgtgggccatgtcggccccgaggcggcgcatggtggcccgatcgccctgatccagaccggcgatgtggtcaccatcgacgcgatcaagggcgaactgagcgtcgatctatcggacgaggagctggccaagcgcaaggaaaactgggccggcccgcgcgagacgatctatgccaccggtgcgatctggaaattcgccaagcttgtgggcgagacctacaagggggctgtcacccatcccggcggcaaggccgagcggcatgtctacatggacctctga

SEQ ID NO: 82 - protein, 585 aa, Roseobacter sp.
MTKFDKSKLPSRYVTEGPARAPHRSYYYAMGMTEAEIHQPLVGVATCWNEAAPCNIALNRQAQAVKGGVKEAHGSPREFTTITVTDGIAMGHEGMRSSLASREAIADTVELTMRGHCYDALVGLAGCDKSLPGMMMAMVRLNVPSVFIYGGSILPGKAPQVNEIPEEFRNRDLTVQDMFEAVGWHQNEQMSDKALDMLERVACPSAGACGGQFTANTMACVSEAIGLALMNSSGMPAPYESRDQYAEASGRAVMTLLEKNIRARDVVTLQSLQNAARVVACTGGSTNAGLHLPAIAHEAGIDFFLEDVCEIFRDTPYFVDLKPGGQYVAKDLYDAGGIPVVMKELRKAGLIHEDCITASGRSIGEELDLIEREADGRVIYPIEKPITKTGGVVGLKGNLAPQGAIVKVAGIAPEHQVFTGPARVFECEEDAFEAVKARQYKEGEVIVIRNEGPAGGPGMREMLSTTAALSGQGMGKKVALITDGRFSGATRGFCVGHVGPEAAHGGPIALIQTGDVVTIDAIKGELSVDLSDEELAKRKENWAGPRETIYATGAIWKFAKLVGETYKGAVTHPGGKAERHVYMDL

SEQ ID NO: 83 - DNA, 1758 bp, Roseovarius sp.
atgaccaagttcgacaaagccaaactgcccagccgtcacgtgaccgaagggcccgagcgcgcgccgcatcggtcctattactatgccatgggcatgaccgagacggaaattcatcagccgctcgtgggcgtggcgacctgctggaacgaagcagccccctgcaacatcgcgctgaaccgtcaggcgcaggcggtcaagggtggcgtgaaagaggcgcatggcagcccgcgtgagtttaccacgatcacggtcacggacgggattgcgatggggcatgagggcatgcggtcgagccttgcgagccgggaggcaattgccgatacggtggaattgaccatgcgtggacattgctatgacgcgctggttggtttggcgggttgtgacaaatccctgcctggaatgatgatggcgatggtgcggttgaacgtgccgtccgtgttcatttatggcgggtcgatcctgccgggcaaggccccgcaggtcgaggagattccggcggatttccgcagccgtgatctgaccgtgcaggacatgttcgaggcggtggggcggcatcagaacaacgagatgtccgacaaggcgctggatatgctggagcgggtggcctgcccatcggcgggggcctgtggcgggcagttcaccgccaacaccatggcctgtgtttctgaggcgattggtctggcgttgatgaattcctcgggtatgcctgccccttatgaaagccgcgatcaatatgccgaggcgtctggtcgtgcggtgatgcatcttttggagcgcaacatccgggcgcgggacgtggtgacgctcaagtcgttgcagaatgcggcgcgggttgtggcctgcaccggtggcagcaccaatgccggtttgcacctgcctgcgattgcgcatgaggcggggattgatttctttctcgaagatgtctgcgacatcttccgcgacacgccctatttcgtcgatctgaaaccgggcggggcctatgtggccaaagacctttatgatgccggtggtatcccggttgtgatgaaggaattgcgcaaggccggtctgattcatgaggattgcatcaccgcgagcgggcgcagcatcggcgaggagctggacctgatcgagcgcgaagccgatggcaaggtcatctatccgattgaaacgccgatcaccaagacggggggcgttgtcggtctcaagggcaatctggccccgaccggcgcgattgtgaaagtggcgggcattgcgcccgagcatcaggtctttaccggcccggcgcgggtgtttgaatgtgaagaagacgcattcgaggccgtcaaagcgcgcgcctataaagagggcgaggtgatcgtcatccgcaatgaaggcccggcaggcggccccggcatgcgcgagatgctgtcgaccacagcggcgctgagcggtcagggcatgggcaagaaggtggcgctgatcaccgacgggcggttctctggggcgacacgcgggttctgtgtgggccatgttggaccagaggccgcgcatggtggcccgattgccttgattgccacgggcgacatgatcacgattgacgcgatcaagggggaattgtcggttgatctgagcgacgaggaactggccaagcgcaaggacgcttggggcgggccgcgcgagacgatctataccagcggggcgctgtggaaatatgcgcaattggtgggcgagacctataagggcgctgtgacccatcccggcgcagcgttcgagcggcatgtctatatggacctctga

SEQ ID NO: 84 - protein, 585 aa, Roseovarius sp.
MTKFDKAKLPSRHVTEGPERAPHRSYYYAMGMTETEIHQPLVGVATCWNEAAPCNIALNRQAQAVKGGVKEAHGSPREFTTITVTDGIAMGHEGMRSSLASREAIADTVELTMRGHCYDALVGLAGCDKSLPGMMMAMVRLNVPSVFIYGGSILPGKAPQVEEIPADFRSRDLTVQDMFEAVGRHQNNEMSDKALDMLERVACPSAGACGGQFTANTMACVSEAIGLALMNSSGMPAPYESRDQYAEASGRAVMHLLERNIRARDVVTLKSLQNAARVVACTGGSTNAGLHLPAIAHEAGIDFFLEDVCDIFRDTPYFVDLKPGGAYVAKDLYDAGGIPVVMKELRKAGLIHEDCITASGRSIGEELDLIEREADGKVIYPIETPITKTGGVVGLKGNLAPTGAIVKVAGIAPEHQVFTGPARVFECEEDAFEAVKARAYKEGEVIVIRNEGPAGGPGMREMLSTTAALSGQGMGKKVALITDGRFSGATRGFCVGHVGPEAAHGGPIALIATGDMITIDAIKGELSVDLSDEELAKRKDAWGGPRETIYTSGALWKYAQLVGETYKGAVTHPGAAFERHVYMDL

SEQ ID NO: 85 - DNA, 1758 bp, Oceanicola batsensis
atgacgaaattcgacaaatcccggctgcccagccgatacgtcaccgaaggacccgagcgcgcgccgcaccgctcctacctctatgccatggggatttccgaagaagagatccaccagccgctcgtcggcgtggcgacctgctggaacgaggccgcgccctgcaacatcgcgctgaaccgccaggcgcaggccgtcaagctgggcgtgaaggcgcgcgaaggcacgccgcgcgaattcaccaccatcaccgtcaccgacggcatcgccatgggccacgaggggatgcgatcctccctcgcctcgcgcgaggccatcgccgacacggtggagctgaccatgcgcggccactgctacgacgcgatcgtcggactggcgggctgcgacaagtccctgcccggcatgatgatggccatggtacgtctgaacgtgccctcggtcttcatctacggcggttcgatcctgcccggcaaggcaccgcaggtcgacgagatccccgaggacttccgcacccgcgacctgaccgtgcaggacatgttcgaagcggtcggccgtcaccagaacaaggagttgtcggacgctgcgctcgacatgctggaacgggtggcctgcccctcctccggcgcctgcggcggccagttcaccgccaataccatggcctgcgtctccgaggcgatcgggctggcgctgctcaactcctccggcatgcctgcgccctacgagagccgcgaccagtacggcgaggcctcgggccgcgcggtcatgaacctgatcgagaagaacatccgcgcccgcgatgtcgtcacccgcaagtcgctggaaaacgccgcgcgcgtcgtggcctgcaccggcggctcgaccaacgccggcctgcacctgcccgcgatcgcgcacgaggccggcatcgactttcaccttgatgacgtctgcgagatcttccgcgacacaccctatttcgtgaacctcaagccgggcggcgaccacgtggccaaggacctgttcgacgtcggcggcatcccggtggtgatgaacgaactgcgcaaggccggcctgatccacgaggactgcgtcacggcctcgggcaagaccatcggcgaggaactcgacaccgtcacccgcaaggccgacggcaaggtgatctatccgatcgagacgccgatcaccaagaccggcggcgtggtgggcctcaagggcaacctcgcccccgaaggcgccatcgtgaaggtcgcgggcatttcggccgaggatcagaagttcaccggccccgcccgggtcttcgaatgcgaggaagacgcctttgccgccgtgcagaaacgggaatacgaggaaggcgaggtcatcgtcatccgcaacgagggccccgcgggcggtcccggcatgcgcgagatgctggccaccaccgccgccctgtccggccagggcatgggcaagaaggtcgcgctgatcaccgacggccgcttttccggcgcgacgcgcggcttctgcgttggccatgtcggccccgaggcagcgcatggcggcccgatcgcgatgctcaagaacggcgacatgatcaccatcgacgccatcgagggttcgatcgaggtcgacctctccgaggccgaactcgaggcgcgcaaggccgactggacgggccctcgcgagacgatctacgcctcgggcgcgctctggaaatatgcgcagctggtcggcaagacctatctcggcgctgtcacccatcccggcggcaaggccgagaaacatatctatgccgatctctga

SEQ ID NO: 86 - protein, 585 aa, Oceanicola batsensis
MTKFDKSRLPSRYVTEGPERAPHRSYLYAMGISEEEIHQPLVGVATCWNEAAPCNIALNRQAQAVKLGVKAREGTPREFTTITVTDGIAMGHEGMRSSLASREAIADTVELTMRGHCYDAIVGLAGCDKSLPGMMMAMVRLNVPSVFIYGGSILPGKAPQVDEIPEDFRTRDLTVQDMFEAVGRHQNKELSDAALDMLERVACPSSGACGGQFTANTMACVSEAIGLALLNSSGMPAPYESRDQYGEASGRAVMNLIEKNIRARDVVTRKSLENAARVVACTGGSTNAGLHLPAIAHEAGIDFHLDDVCEIFRDTPYFVNLKPGGDHVAKDLFDVGGIPVVMNELRKAGLIHEDCVTASGKTIGEELDTVTRKADGKVIYPIETPITKTGGVVGLKGNLAPEGAIVKVAGISAEDQKFTGPARVFECEEDAFAAVQKREYEEGEVIVIRNEGPAGGPGMREMLATTAALSGQGMGKKVALITDGRFSGATRGFCVGHVGPEAAHGGPIAMLKNGDMITIDAIEGSIEVDLSEAELEARKADWTGPRETIYASGALWKYAQLVGKTYLGAVTHPGGKAEKHIYADL

SEQ ID NO: 87 - DNA, 1764 bp, Oceanicola granulosus
atgctcaagggcaagctggacaagtcgaaactgccgagccgccatgtgaccgacggtccggcccgcgcgccgcatcggtcctacctctacgcgatgggcctctcggacgaggagatcgcgcagccgctggtcggcgtcgccacctgctggaacgaggccgcgccctgcaacatcgcgctgaaccggcaggcgcagtcggtcaagctgggcgtgcgcgccgcctcgggcacgccgcgcgagttcaccacgatcaccgtcaccgacgggatcgccatgggccacgaggggatgcgctcgtcgctggcgagccgcgaggcgatcgccgacaccgtcgagctgaccatgcgcggccattgctacgacgcgctcgtcgggctcgcgggctgcgacaagtcgctgccggggatgatgatggcgatggtgcggctcaacgtgccgtcggtgttcatctacggcggctcgatcctgccgggcaaggtgccggccggcgccgacgtcccggccgacttcgccacccgcgacctgaccgtgcaggacatgttcgaggcggtcggccggcaccaggccggcgatctgtccgatgccgcgctcgacgtgctcgagcgggtcgcctgcccctccgccggggcctgcggcggccagttcaccgccaacaccatggcctgcgtctccgaggcgatcggcctggcgctgatgaactcctccggcgcgcccgcgccctacgagagccgcgaccagtacagcgtcgcctcgggcgaggcggtgatgaagcttctcgagagcaacatccgcgcccgcgacgtcgtcacccgcaagagcctcgagaacgccgcccgggtcgtcgcctgcaccggcggctcgaccaacgccggcctgcacctgccggccatcgcgcacgaggcggggatcgacttcgacctgttcgacgtctgcgacatcttccgcgacaccccctacttcgtcgacctcaagcccggcggccagtacgtggctaaggacctgttcgaggccggcggcgtgcccgtggtgatgaaggagctgcgcaaggccgggctgctgcacgaggactgcatcaccgccagcggcgagacgctcggcgaggcgctcgacaagatcaccggcgaggccgacggccgcgtcatccatcccgtcgccaccccgatcagcaagaccggcggcgtcgtcgggctgaagggcaacctcgccccggaaggtgcgatcgtgaaggttgccggcatggacgccgagcagcaggtcttcaccggcccggcgcgggtgttcgagtgcgaggaggacgccttcgaggcggtcaaggcgcgcagctacaaggaaggcgaggtcatcgtcatccgcaacgagggccccgccggcggccccggcatgcgcgagatgctggccaccaccgccgcgctctccgggcagggcatgggcaagaaggtcgcgctcatcaccgacggccgcttctcgggcgcgacgcgcggcttctgcgtcggccatgtcggccccgaggccgcccatggcgggccgatcgcgatgctcgagaatggcgacatgatcaccatcgacgccatcaagggcgagatctccgtcgcgctgaccgaggagcagttcgccgagcgcaaggccgcctggccgggcgcgcgcaagacggactacgcctcgggcgcgctgtggaagtacgcccagctcgtcggctccacccgtctcggcgcggtgacccatccgggcgcgaaggcggagacgcacgtctacatggatctctga

SEQ ID NO: 88 - protein, 587 aa, Oceanicola granulosus
MLKGKLDKSKLPSRHVTDGPARAPHRSYLYAMGLSDEEIAQPLVGVATCWNEAAPCNIALNRQAQSVKLGVRAASGTPREFTTITVTDGIAMGHEGMRSSLASREAIADTVELTMRGHCYDALVGLAGCDKSLPGMMMAMVRLNVPSVFIYGGSILPGKVPAGADVPADFATRDLTVQDMFEAVGRHQAGDLSDAALDVLERVACPSAGACGGQFTANTMACVSEAIGLALMNSSGAPAPYESRDQYSVASGEAVMKLLESNIRARDVVTRKSLENAARVVACTGGSTNAGLHLPAIAHEAGIDFDLFDVCDIFRDTPYFVDLKPGGQYVAKDLFEAGGVPVVMKELRKAGLLHEDCITASGETLGEALDKITGEADGRVIHPVATPISKTGGVVGLKGNLAPEGAIVKVAGMDAEQQVFTGPARVFECEEDAFEAVKARSYKEGEVIVIRNEGPAGGPGMREMLATTAALSGQGMGKKVALITDGRFSGATRGFCVGHVGPEAAHGGPIAMLENGDMITIDAIKGEISVALTEEQFAERKAAWPGARKTDYASGALWKYAQLVGSTRLGAVTHPGAKAETHVYMDL

SEQ ID NO: 89 - DNA, 1728 bp, Rhodobacterales bacterium
atgacgaaatttgacaaaaccaacctgcccagccgccatgtaaccgagggtcctgcgcgtgcgccgcatcgttcgtatttatatgctatggggttgtctgaagatgaaattcaccagcctctagtcggtgttgccacatgctggaacgaggcggccccctgtaatatcgccctgaaccgtcaggcgcaatctgtgaaaatgggcgtcaaacaagcgatgggtacgccacgcgaattcaccacgattaccgttacagacggtattgcgatgggtcacgaaggtatgcgttcgtctttggccagccgcgaggcaatcgctgacacggttgaattgaccatgcgcggtcattgctatgatgcgatcgttggtcttgctggttgtgacaagtcattgcccggtatgatgatggcgatgatccgtttaaacacaccgtctgtgtttgtttatggcggttcaatcttgcccggtcgttacgagggtcgcgatgttactgtacaggacgtttttgaggccgtcggccagcaccaagctggaaacctttcgtcttgcgagcttgaaaaactagaagcggttgcttgtccttctgcgggtgcttgtggtggtcagtttaccgccaacaccatggcttgtgtttccgaggcaatcggtcttgccttgccaaattccgcgggcgcaccggcaccgtatgaaagccgtgatcaattctgcgaggcatccggccgcgctgttatgaatttgatcgccaaaaacattcgtgcgcgtgacatcgtaacacgtaaatcattggaaaatgcggcacgtgttgttgcttgtactggtggttcaacgaatgcaggtcttcacttgccagccatggcgcatgaggcaggcattgatttttatctggatgacgtttgtgacatcttccgcgaaacgccttatttcgtcgatctgaaaccaggtggtaattatgtagccaaagacctttatgaggttggtggcgttcccgtaattatgcgtgaattgcgcaaagcggggttgatccacgaggattgcatgacagccactggccgcacaatgggcgaagagattgatcttgttgatcgcgaagcggacggtaaagtgatttaccccgttgatgccccgttgacgaaaactggcggcgttgttggccttaaaggtaacttggccccagaaggcgcgattgtgaaagtggcgggtatcccatcacagcaccaagtgttttccggccctgcccatgtttttgaatgtgaacaggacgcttttgaagccgtgcaaaaccgtgactacaaagaaggcgaagtattcgtcattcggaacgaaggcccatcaggtggccctggcatgcgtgaaatgttggcaacgaccgccgccctttctggtcaaggcatgggtaaaaagatcgccctgattacagatggtcgcttttctggtgcaacacgtggtttctgtgttggtcacgttggaccagaggcggctcatggtggcccgattgcgttggttgaaaatggtgacatcatcaccatcaatgcaattgaaggcgaaatttcggttaatttgactgatgatgagttggctgaacgtaagacaaactggaaaggaccacgcgaaacgatctatgcgtctggtgctttgtggaaatacagtcagcaagttggcgaagtatacaagggtgctgttacccatccaggtggcaaagccgaaaaacacgtttacatggatttgtaa

SEQ ID NO: 90 - protein, 575 aa, Rhodobacterales bacterium
MTKFDKTNLPSRHVTEGPARAPHRSYLYAMGLSEDEIHQPLVGVATCWNEAAPCNIALNRQAQSVKMGVKQAMGTPREFTTITVTDGIAMGHEGMRSSLASREAIADTVELTMRGHCYDAIVGLAGCDKSLPGMMMAMIRLNTPSVFVYGGSILPGRYEGRDVTVQDVFEAVGQHQAGNLSSCELEKLEAVACPSAGACGGQFTANTMACVSEAIGLALPNSAGAPAPYESRDQFCEASGRAVMNLIAKNIRARDIVTRKSLENAARVVACTGGSTNAGLHLPAMAHEAGIDFYLDDVCDIFRETPYFVDLKPGGNYVAKDLYEVGGVPVIMRELRKAGLIHEDCMTATGRTMGEEIDLVDREADGKVIYPVDAPLTKTGGVVGLKGNLAPEGAIVKVAGIPSQHQVFSGPAHVFECEQDAFEAVQNRDYKEGEVFVIRNEGPSGGPGMREMLATTAALSGQGMGKKIALITDGRFSGATRGFCVGHVGPEAAHGGPIALVENGDIITINAIEGEISVNLTDDELAERKTNWKGPRETIYASGALWKYSQQVGEVYKGAVTHPGGKAEKHVYMDL

SEQ ID NO: 91 - DNA, 1734 bp, Paracoccus denitrificans
atgaaaaacagccgcttcgacaagtcgtccctgcccagccgccatgtgaccgaagggccggcccgcgcgccgcatcgcagctatttctatgccatgggcatatcggaggaagaaatccattccccctgggtgggcgtcgccacctgctggaacgaggccgcgccctgcaacatcgcgctggcccgacaggcgcaatcggtcaagcagggcgtcaagaagggtggcggctgcccgcgcgaattcaccaccatcaccgtcaccgacggtattgccatgggacatgaggggatgcgctccagcctcgcctcgcgcgatgccatcgccgatacggtcgagctgaccatgcgcgggcattgctacgacgcgctggtcgggctggcgggctgcgacaagtcgctgccgggcatgatgatggccatggtgcggctgaacgtgcccagcgtcttcatctatggcggctcgatcctgccgggcaagctcaacggccgcgacgtggtggtgcaggacgtgttcgaggcggtgggccagcacgcggccggcaacatgtccgatgccgagctggagatcctggagcgcgtggcctgcccctcggccggggcctgcggcgggcaatataccgcgaacaccatggcttgcgtgtcggaagccatcgggctggcgctgatgaacagctcgggcgcgccggcgccttacgaatcgcgcgaccagtatgggctggcctcgggcgaggcggtgatggcgctgatcgaaaggaacatccgtgcccgcgacgtggtgacgcgcaaatcgctggaaaacgcggcgcgggtggtggcctgcaccggcggctcgaccaatgccgggttgcacctgcccgccatcgcgcatgaggcggggatcgaattcgacctgttcgacgtctgcgagatcttccgcgacacgccctatttcgtgaacctgcgcccgggcggcgattacgtcgccaaggacttgttcgaggccgggggcgtcccggtcgtcatgcgcgaattgcgccgcgccgggctgatccacgaggattgcctgaccgcctcgggccgcagcatgggcgaggagctggacctggtcaagcgcgaggccgacggcaaggtgatccatccggtgacggcgccgctgtccaggaccggcggcgtggtcgggctgcgcggcaacctggcgcccgacggcgccatcgtgaaggtcgcgggaatggcgcccgagcaccaggtctttaccggccccgcccgggtcttcgaatgcgaggaagaggcgttcgaggccgtcgcccgccgcgattacagcgagggctgcgtgatcgtcatccgaaacgaggggccggccggcggccccggcatgcgcgagatgctggcgaccacggcggcgctgtcggggcagggcatgggcaagaaggtggcgctgatcaccgacgggcggttctcgggcgcgacgcgcggcttctgcgtcggccatgtcggtcccgaggcggcgcatggcggccccatcgccctgctgcgcgacggcgacatgatcaccatcgacgcgatcaggggcgagatctcggtggcgctgccggacgaggaactgacgcggcgccgcgccgcatgggcgggaccgcgcaagaccgactatgcctcgggcgcgctgtggaaatacgcccagttggtcggcaaggcgcgctatggcgcggtcacccatccgggcgcggcggccgaaacccatgtctatatggatcagtga

SEQ ID NO: 92 - protein, 577 aa, Paracoccus denitrificans
MKNSRFDKSSLPSRHVTEGPARAPHRSYFYAMGISEEEIHSPWVGVATCWNEAAPCNIALARQAQSVKQGVKKGGGCPREFTTITVTDGIAMGHEGMRSSLASRDAIADTVELTMRGHCYDALVGLAGCDKSLPGMMMAMVRLNVPSVFIYGGSILPGKLNGRDVVVQDVFEAVGQHAAGNMSDAELEILERVACPSAGACGGQYTANTMACVSEAIGLALMNSSGAPAPYESRDQYGLASGEAVMALIERNIRARDVVTRKSLENAARVVACTGGSTNAGLHLPAIAHEAGIEFDLFDVCEIFRDTPYFVNLRPGGDYVAKDLFEAGGVPVVMRELRRAGLIHEDCLTASGRSMGEELDLVKREADGKVIHPVTAPLSRTGGVVGLRGNLAPDGAIVKVAGMAPEHQVFTGPARVFECEEEAFEAVARRDYSEGCVIVIRNEGPAGGPGMREMLATTAALSGQGMGKKVALITDGRFSGATRGFCVGHVGPEAAHGGPIALLRDGDMITIDAIRGEISVALPDEELTRRRAAWAGPRKTDYASGALWKYAQLVGKARYGAVTHPGAAAETHVYMDQ

SEQ ID NO: 93 - DNA, 1767 bp, Oceanibulbus indolifex
atgtccaccaccccacgcttcgacaaatcccggctgcccagccgccacgtgaccgaaggcccggcccgcgcgccgcatcggtcttactactatgccatgggcatgaccgagcaagagattcaccagccgctggtgggcgtcgccacctgctggaacgaagcagcgccctgcaacatcgcgctgagccgtcaggcgcaggccgtgaagatcggtgtgcattccgaacagggcacgccgcgcgagtttaccacgatcaccgtcaccgatggtatcgcgatgggccacgagggcatgcgctcctcgctcgcgtcgcgcgaagcgattgccgacacggttgagctgaccatgcgcggccactgctatgacgccatcgtgggcctcgcgggctgcgacaaatctctgccggggatgatgatggcgatgctgcggttgaacgtgccgtcggtcttcctctatggcgggtcaatcctgccgggcaaagcacctgccggggccgatgtgcccgaggatttcgccagccgcgatctgaccgtgcaggacatgttcgaagcggtgggccggttccagaacggcaccatgtcgcaagcagccctcgacgtgcttgagcgcgtggcttgcccatcggcgggcgcttgtggcggccagttcaccgccaatacaatggcctgcgtctccgaggcgatcggcctcgcgctgcccaactcgtccggcatgcccgcgccctatgagagccgcgacgcctatgccgaggcctctggcgcggcggtgatgaacctgatcgaaaagaacatccgcgcccgcgacatctgcacccgcgaagcctttgaaaacgcagcgcgcatcgtggcctgcaccggcggctcgaccaacgcgggcctgcacctgcccgccatggcgcatgaagccgggatcgagttctacctcgaagacgtttgcgaaatcttccgcgacacaccctatttcgtcgatatgaaaccgggcggcgcttatgtggccaaagatctttacgatgcgggcggcgtgccggtggtgatgaatgagttgcgcaaagcgggcctcattcacgaagactgcatgactgccaccggctactccatgggcgaagtgctcgatcaggttacccgcgaagcagacggcaaggtgatccactcggtcgccaatccgatcagcaagaccggcggtgtcgtgggcctcaaaggcaacctcgcccccgaaggtgccatcgtgaaaatcgcgggcatgtctgacgaagacatcgtcttcaccggcccggcactggtgttcgaatgtgagcaagacgctttcgaagccgtgcaaaaccgcgcctattccgaaggcgacgttttcgtcatccgcaacgaaggccccgcaggcggccccggcatgcgcgagatgctggccaccaccgccgcgctttcgggtcaaggcatgggcaagaaggtggcgctgatcaccgatggccgcttctcgggtgcgacacgtggcttctgtgtgggtcacgttggccccgaagcggcgcatggcggaccgattgcgctgctgaaaaacggcgacatgatcacccttgatgcgatcaaaggttccatcagcgtcgacctgagcgatgatgagcttgccgagcgccgcaagggctgggctggcccgcgtgccacaaactaccaaagcggcgcgctgtggaaatacgccaaacttgtcggccctacctaccttggtgccgtgacacatccgggcgctcaggccgagacccatgattacatggacctctaa

SEQ ID NO: 94 - protein, 588 aa, Oceanibulbus indolifex
MSTTPRFDKSRLPSRHVTEGPARAPHRSYYYAMGMTEQEIHQPLVGVATCWNEAAPCNIALSRQAQAVKIGVHSEQGTPREFTTITVTDGIAMGHEGMRSSLASREAIADTVELTMRGHCYDAIVGLAGCDKSLPGMMMAMLRLNVPSVFLYGGSILPGKAPAGADVPEDFASRDLTVQDMFEAVGRFQNGTMSQAALDVLERVACPSAGACGGQFTANTMACVSEAIGLALPNSSGMPAPYESRDAYAEASGAAVMNLIEKNIRARDICTREAFENAARIVACTGGSTNAGLHLPAMAHEAGIEFYLEDVCEIFRDTPYFVDMKPGGAYVAKDLYDAGGVPVVMNELRKAGLIHEDCMTATGYSMGEVLDQVTREADGKVIHSVANPISKTGGVVGLKGNLAPEGAIVKIAGMSDEDIVFTGPALVFECEQDAFEAVQNRAYSEGDVFVIRNEGPAGGPGMREMLATTAALSGQGMGKKVALITDGRFSGATRGFCVGHVGPEAAHGGPIALLKNGDMITLDAIKGSISVDLSDDELAERRKGWAGPRATNYQSGALWKYAKLVGPTYLGAVTHPGAQAETHDYMDL

SEQ ID NO: 95 - DNA, 1767 bp, Sulfitobacter sp.
atgtccaccaacacccgctttgataaatccagactgccaagccggcacgtgaccgaggggccagagcgcgcaccgcaccggtcctattactacgcaatgggcatgaccgaagaagagattcaccagcctctggtgggtgtggcaacctgctggaacgaagcggccccctgtaacatcgcgctgaaccgtcaggcccaagcggtcaaggtcggcgtcaaggcgcagcaaggcacgccacgcgaattcaccaccatcactgtcaccgacgggatcgccatgggccacgagggcatgcgctcttccctagcgtcgcgcgaagcgattgccgacacggtagagctgacaatgcgcggtcactgctacgatgcgattgtcggtcttgcgggctgtgacaaatcgctgccgggcatgatgatggcgatgctgcggctgaacgtgccgtccgtgttcctctacggtgggtcgatcctgccgggcaaagtcccggaaggggccgatgtgcctgccgatttcgccagccgcgatctgactgtgcaagacgttttcgaagccgtgggtaactaccagaacggcagcatgtcgcaagccgcgcttgaagtattggagcgcgtcgcttgcccgacagccggtgcctgcgggggccagttcaccgccaacactatggcctgcgtgtccgaggcaattggtctggcgctgctgaactcctctggcatgcctgcgccctatgaatcccgcgacgcctatgcggcggcctcgggtgaagccgtcatgaacctgatcgaaaagaacatccgcgcgcgcgacatctgcacccgcgaagcgttcgagaatgcggcgcgtatcgtggcctgcaccggcgggtcgaccaatgccggtctgcacctgcccgctatggccgccgaggcgggtatcgactttaacctcagcgatgtgtgcgacatcttccgcgacacgccttatttcgtcgacatgaaacccggcgggtcgcatgtggcaaaagacctgtatgacgcgggcggcgtgcctgttgtgatgaaagaactgcgcaaggctggcctgctgcatgatgactgtctcaccgcctcgggcctgtccatcggtgaagagctcgacaagatcgaacgcgaagccgacggcaaggtgatccacgcgatcgaaacaccgatcagcaagaccggcggcgtcgttggtctgaagggcaacttggcacccgaaggggccatcgtgaaaatcgcgggcatgtccgaagaagacatcgtctttaccggtccggcgctgatctttgaatgtgaacaggatgcgttcgaagccgtgcaaaaccgggcctacagcgaaggcgacgtgttcgtgatccgcaacgaaggccccgctggtggccccggcatgcgcgaaatgctggcgaccacggcggccctgtccggtcaaggcatgggcaaaaaggtggcactgatcaccgacggccgtttctccggcgcgacacggggtttctgcgttggtcacgtcggccccgaagccgcacatggcggaccgattgccttgctcaaacagggtgacatgatcacactgaacgcgatcaccggttcgatctctgtcgatatctcggacgaggaaatggcagaacgcaaagcggcttggcccggtgcccgcaaaacaaactatcaaagcggtgcactgtggaaatacgcgcagcttgtgggcccaacctatcttggtgcggtgacgcatcccggcgcgaaggcggaaacacatgactatatggacctgtaa

SEQ ID NO: 96 - protein, 588 aa, Sulfitobacter sp.
MSTNTRFDKSRLPSRHVTEGPERAPHRSYYYAMGMTEEEIHQPLVGVATCWNEAAPCNIALNRQAQAVKVGVKAQQGTPREFTTITVTDGIAMGHEGMRSSLASREAIADTVELTMRGHCYDAIVGLAGCDKSLPGMMMAMLRLNVPSVFLYGGSILPGKVPEGADVPADFASRDLTVQDVFEAVGNYQNGSMSQAALEVLERVACPTAGACGGQFTANTMACVSEAIGLALLNSSGMPAPYESRDAYAAASGEAVMNLIEKNIRARDICTREAFENAARIVACTGGSTNAGLHLPAMAAEAGIDFNLSDVCDIFRDTPYFVDMKPGGSHVAKDLYDAGGVPVVMKELRKAGLLHDDCLTASGLSIGEELDKIEREADGKVIHAIETPISKTGGVVGLKGNLAPEGAIVKIAGMSEEDIVFTGPALIFECEQDAFEAVQNRAYSEGDVFVIRNEGPAGGPGMREMLATTAALSGQGMGKKVALITDGRFSGATRGFCVGHVGPEAAHGGPIALLKQGDMITLNAITGSISVDISDEEMAERKAAWPGARKTNYQSGALWKYAQLVGPTYLGAVTHPGAKAETHDYMDL

SEQ ID NO: 97 - DNA, 1764 bp, Roseobacter denitrificans
atgtccagccagcgctttgataaatccaagctgcccagccgccatgtgaccgagggaccctcacgggcgccgcatcggtcctactattacgcgatgggcatgacggaggaagaaatccatcaaccgcttgttggcgtggccacttgctggaacgaggccgccccctgcaacatcgcgctgaaccgccaggcgcaatcggtcaagatgggcgtgaaacgcgaaagcggcacgccacgtgaattcaccaccatcaccgtcaccgacggcatcgcgatgggccacgagggcatgcggtcgtcactggcgtcacgcgaggcaattgccgatacggtggaactgaccatgcgcgggcattgctatgacgcacttgtggggctggcgggctgcgacaaatccctgccgggcatgatgatggcgatgatccgtctgaatgtgccatcggttttcctttatggcgggtcaatcctgccgggacgtgcgcccaagggggcgtcggtgcctgccgaatacgccgaccgcgacctgaccgttcaggacatgttcgaagctgttgggcatcaacagaacggcaccctgagcgaggcagaactcgaagtgctcgaacgcgtcgcctgcccttctgccggggcttgtggcgggcagtttaccgccaacaccatggcctgtgtatccgaggccatcggtctggcgttgcccaattccgccggggcacctgcgccgtacgaatcccgcgacgcctatgccgaagcctcgggtgcggcggtcatgaacctgatcgaaaagaacatccgtgcgcgcgacatctgcacgcgggaggccttcgagaatgccgcgcgcatcgtcgcttgtacgggcgggtcgaccaacgccggtctgcacctgcctgccatggcgcatgaagcgggcatcgatttcttcctcgaagacgtctgcgagatcttccgcgacacgccctatttcgtcgatctgaaaccgggcgggcagtatgtcgccaaggacatgtacgaagccggcggcgtgcccgtggtaatgaaagagctgcgcaaggcaggcctgttgcacgaggactgcatgaccgtcaccggctattccatcggcgaggaactggacaaggtcagccttgaggcggatggccgagttgtctatccgattgaaacaccgctgtcgaaaaccggtggcgtcgtcggcctcaagggcaaccttgcccccgaaggagccatcgtgaaaatcgccggaatggagccgcagcatttgctgttcaccggccctgcgcgaatctttgagtgtgagcaggacgcgtttgaagccgtccagaaccgcacctacaaagagggcgatgtctttgtcatccgcaacgagggccctgctggcggccccggcatgcgcgagatgctggcaacgacggcggcgctttcgggtcagggcatgggcaagaaagtcgcgctgatcacggatggacgtttctcgggggcgacacgcgggttctgcgtcggccatgtgggtcccgaggccgcgcacggaggccccatcgccttgctcaaggatggcgatatgatcacgcttaacgcgatcgaggggaccatcaccgtcgatgtgtccgacgaggagatggccgagcgtaaagccaattggaaaggggcgcgtccaacgatctatggtgctggtgccttgtggaaatacgcgcaacttgtggggccaacctatctcggggccgtgacccatccgggcggtaaagacgaaggccacgcgtacatggaactgtaa

SEQ ID NO: 98 - protein, 587 aa, Roseobacter denitrificans
MSSQRFDKSKLPSRHVTEGPSRAPHRSYYYAMGMTEEEIHQPLVGVATCWNEAAPCNIALNRQAQSVKMGVKRESGTPREFTTITVTDGIAMGHEGMRSSLASREAIADTVELTMRGHCYDALVGLAGCDKSLPGMMMAMIRLNVPSVFLYGGSILPGRAPKGASVPAEYADRDLTVQDMFEAVGHQQNGTLSEAELEVLERVACPSAGACGGQFTANTMACVSEAIGLALPNSAGAPAPYESRDAYAEASGAAVMNLIEKNIRARDICTREAFENAARIVACTGGSTNAGLHLPAMAHEAGIDFFLEDVCEIFRDTPYFVDLKPGGQYVAKDMYEAGGVPVVMKELRKAGLLHEDCMTVTGYSIGEELDKVSLEADGRVVYPIETPLSKTGGVVGLKGNLAPEGAIVKIAGMEPQHLLFTGPARIFECEQDAFEAVQNRTYKEGDVFVIRNEGPAGGPGMREMLATTAALSGQGMGKKVALITDGRFSGATRGFCVGHVGPEAAHGGPIALLKDGDMITLNAIEGTITVDVSDEEMAERKANWKGARPTIYGAGALWKYAQLVGPTYLGAVTHPGGKDEGHAYMEL

SEQ ID NO: 99 - DNA, 1764 bp, Jannaschia sp.
atgaccgccaacaggccagacaaatccagattgcccagtcgccatgtgaccgaaggacccgagcgcgcgccgcatcggtcgtatttctacgccatggacctgacacaggagcagatcgaccagccattcgtcggcgtcgccacctgctggaacgaagcggccccttgcaacatcgcgctcaactggcaggcgcaatcggtgaaacgcggtgtgggtgaggcgaacggtacgccgagggaattcaccacgatcaccgtcaccgacggcattgcgatggggcatgaagggatgcggtcctcgctggcgtcgcgcgatgcgatcaccgacacggtggaactgacgatgcgcggccactgctatgacgcattggtcgggcttgccgggtgcgacaagtccctgcccggcatgatgatggccatggtgcgcctgaacgtgccgtccgtcttcatctatggcggcacgatccttcccggcaaagcgcctgaagttgccgacattcccgccgagtttgccaaccgtgacctgaccgtgcaggacatgttcgaggccgtgggcaagtaccagtccggccaattgagcgaagccgccctggaagttctggaacgcgttgcctgcccgtctgcgggcgcctgtggcggtcagttcaccgccaacaccatggcatgtgtgtccgaggcgattggtctggcaatgctcaactcctccgggatgcctgcgccttacgaggggcggaaggaattcggcgaggcaagcggtcgcgcggtgatgaacctgcttgaaaagaacatccgcgcccgtgacgtcgtcacccgcaaagcgttggagaatgcggcccgtgttgtggcgtgtaccgggggctccaccaatgcaggtctgcaccttcccgcgattgcccatgaggccggaatcgacttcgacctctttgacgtctgcgacatcttcaaggacacgccctacttcgtcgacatgaaacccggcggtcagtatgtggcgaaagacctctatgaggtgggcggcgtgccagtcgtgatgaaggagctgttgaaagaggggctgttgcacggcgattgcctcactgcctctggcgagacgatggaagaggcgctcgacaagatccagggcacgcccgatggccgtgtggtccatacggtccagaacccgatcaccagcaccggcggcgtggtcggcctgcgcggcaatctcgccgaagagggtgcgatcgtgaaagttgcgggcatggatgaggcaagccaggtcttcaccggacccgcgcgcgtgtttgaatgcgaagaagacgcctttgccgccgtgaaggcgcgcggctacgaggaaggcgaagtcattgtcatccgcaatgaagggccaaagggcggcccgggcatgcgggaaatgttggcgacgacggcggcattgtcgggtcagggcatgggcaagaaggtggccctgatcaccgacggccggttctctggtgcaacgcggggcttctgcgtcggtcacgtgggacctgaggcggctgttggcggaccgattggtctgctggagaacagcgacatgatcaccatcaatgcgctgacgggggaactgtcggttgccttgaccgaggcggaattggccgagcgtcggaaggcctgggccggtccgcgtgagacaatgtacgcctctggcgcgttgtggaaatacgcgcaattggtgggagaggcgcgctatggcgcggtgacccatcccggcggggccaaggaaaagcacgtctatgcggacatctag

SEQ ID NO: 100 - protein, 587 aa, Jannaschia sp.
MTANRPDKSRLPSRHVTEGPERAPHRSYFYAMDLTQEQIDQPFVGVATCWNEAAPCNIALNWQAQSVKRGVGEANGTPREFTTITVTDGIAMGHEGMRSSLASRDAITDTVELTMRGHCYDALVGLAGCDKSLPGMMMAMVRLNVPSVFIYGGTILPGKAPEVADIPAEFANRDLTVQDMFEAVGKYQSGQLSEAALEVLERVACPSAGACGGQFTANTMACVSEAIGLAMLNSSGMPAPYEGRKEFGEASGRAVMNLLEKNIRARDVVTRKALENAARVVACTGGSTNAGLHLPAIAHEAGIDFDLFDVCDIFKDTPYFVDMKPGGQYVAKDLYEVGGVPVVMKELLKEGLLHGDCLTASGETMEEALDKIQGTPDGRVVHTVQNPITSTGGVVGLRGNLAEEGAIVKVAGMDEASQVFTGPARVFECEEDAFAAVKARGYEEGEVIVIRNEGPKGGPGMREMLATTAALSGQGMGKKVALITDGRFSGATRGFCVGHVGPEAAVGGPIGLLENSDMITINALTGELSVALTEAELAERRKAWAGPRETMYASGALWKYAQLVGEARYGAVTHPGGAKEKHVYADI

SEQ ID NO: 101 - DNA, 1731 bp, Caulobacter sp.
atgaccaagaaacccgacgggacctgggacaagtcgcaactgcccagccggcatgtaaccgaagggccggcccgcgcgccgcaccgctcttattattacgccatgggtcttggcacgcgtgagatcgcccagccgttcgtcggcgtcgcctcgtgctggaacgaggccgcgccctgcaacaccgccctgatgcgccaggccaacgccgtggccaagggcgtcaaggcggccggcggcaccccgcgcgagttctgcaccatcaccgtcaccgacggcatcgccatgggccacgagggcatgcgttcgtccctggtcagccgcgacgtgatcgccgactccgtcgagctgaccatgcgcggccacggctatgacgcgctcgtgggcgtcgccgggtgcgacaagagcctgccgggcatgatgatggccatgctgcgcctcaacgtgcccagcgtgttcctgtacggcggctcgatcctcccgggacgcttccagggccgcgacatcaccgtgatggacgtcttcgagggcgtcggcgcctatgccgccgggaccatggacgccaagaccctgtgcgagctggagcagcacgcctgcccgtcggacggcgcctgcggcggccagttcacggccaacaccatggcctgcgtgtcggaagccatcggcctggccctgccgctgtcctcggccctgccggccccgtacctggaccgcgaccagtacgcggtggcctcgggcgaggcggtgatgcggctgatcgagcagaacatccgcccgcgcgatatctgcacccgcaaggccttcgagaacgccgccgtcgtcgtcgcggccaccggcggttcgaccaatggcgcgctgcacctgccggccatggcccacgagtgcggcatcgagttcaccctcaaggacgtggccgagatcgccgcccgcacgccctatatcgccgacctcaagcccggcggtcgctacgtggccaaggacatgggcgaggccggcggcgtgccgatgctgctgcgcaccctgctggacgccggcctgctgcacggcgacgtcatgaccgtcaccggcaagaccctggccgagaacctggccgatgtggtctggcgtgaggaccaggacgtgatccgcccggtctccaatccgctgtcgccgactggcggcgtggtcggcctgtggggctcgctggcgcccgagggcggcatcgtcaaggtggccggcctcaagcaccaggtgcaccgcggcccggcccgggtgttcgacggcgaggcggcctgtttcgaagcggtgtcgaaccgcgactacaaggcaggcgacgtcctggtcatccgctacgaaggtccgcgcggcgggccgggcatgcgcgagatgctgtcgacgaccgccgcgatctacggccagggcgtggagaacatcgccctgatcaccgacggccgcttctcgggcgccacgcgcggcctgtgcatcggccacgtgggtcccgaggccgccgtgggcggtccgatcgccctggtgcaggacggcgacatcatcagcatcgacgccaccaaggggacgatcgagcttgaggtcgaggccgaggaactggcgcgccgcaaggccgcctggaagccgcgcggccacgactacaacagcggcgcgatctggaagttcgcccaactggtcggtccagcctatcttggcgccacgacccatccgggcgcggccaaggagacgcacgtctacgcggacatctga

SEQ ID NO: 102 - protein, 576 aa, Caulobacter sp.
MTKKPDGTWDKSQLPSRHVTEGPARAPHRSYYYAMGLGTREIAQPFVGVASCWNEAAPCNTALMRQANAVAKGVKAAGGTPREFCTITVTDGIAMGHEGMRSSLVSRDVIADSVELTMRGHGYDALVGVAGCDKSLPGMMMAMLRLNVPSVFLYGGSILPGRFQGRDITVMDVFEGVGAYAAGTMDAKTLCELEQHACPSDGACGGQFTANTMACVSEAIGLALPLSSALPAPYLDRDQYAVASGEAVMRLIEQNIRPRDICTRKAFENAAVVVAATGGSTNGALHLPAMAHECGIEFTLKDVAEIAARTPYIADLKPGGRYVAKDMGEAGGVPMLLRTLLDAGLLHGDVMTVTGKTLAENLADVVWREDQDVIRPVSNPLSPTGGVVGLWGSLAPEGGIVKVAGLKHQVHRGPARVFDGEAACFEAVSNRDYKAGDVLVIRYEGPRGGPGMREMLSTTAAIYGQGVENIALITDGRFSGATRGLCIGHVGPEAAVGGPIALVQDGDIISIDATKGTIELEVEAEELARRKAAWKPRGHDYNSGAIWKFAQLVGPAYLGATTHPGAAKETHVYADI

SEQ ID NO: 103 - DNA, 1719 bp, Candidatus Pelagibacter ubique
atggcaaaatttaataaaaaaaaattaccaagcagacatacttcattaggtgctgatagagctccacatagatcattttactatgcaatgggtgaaacagaaaaagatgtagcaaagccatttgttggtgttgtgtcaacttggaatgaagctgctccttgtaatattgctttaatgagacaagctcaatctgtcaaaaaaggcgttagagcttcaggtggaacccctagagaattttgtacgataacagtaactgatggtattgccatgggtcacgaaggaatgaagtcatctttaatctctcgcgaggtaattgctgattcaactgaacttactgtgcgtggtcattgttatgatgcgcttgttggtattgctggttgtgataaatctttacctgccttaatgatggcaatggttagattaaatgttccaagtgtatttatttatggtggctcaatacttccaggtcaatataaaggtaaagatgtaactgttgttgatgtttttgaagcagttggaaaacactcagctggaaaaatgtctgcaaaggaattaagaaaattagagttagttgcttgcccaagtgcaggtgcatgtggaggtcaatttactgcaaatactatggcctgcgtttctgaagctattggtttagcattaccttattcagctggaacacctgctccatacgaagaacgtgataagtatgcattattaagtggcaagactgtaatgaatttattacaaaaaaatattcgtccaagagacattgttacaaaaaaatctttagaaaatgctgcaacaattgtagcggctactggtggatcgacaaatgctgctttacacctaccagctatagctaatgaaattggaattaagtttgatttaatggatgtagctaaaatttttaaaaaaactccatatcttgcagatttaaaaccaggtggaaaatatgttgcaaaagatatgtggttagctggtggagtacctatgttattaaaaactctttttgatggtggttttatacatggtgattgcatgactgttactggaaaaacaatgaaacaaaatttaaaaaatattaaatttaatcctaagcaaaaagtattaagagcatatgataatcctttatcaccagatggcggtgttgtaggtcttaaaggtaacttagctcctgatggtggaattgttaaaattgctggtttaaaaaaattacaattcactggaaaagctagatgttttgataatgaagaagcagcaatggcttgtgtgcaaaagaaaaaatataaagcaggtgatgtaattattattcgttacgaaggaccagttggcggtcctggtatgagagaaatgctttcaacaacaggtgctatttatggtcaaggtatgggtgagaaggttgctctaattacagatggtagattttctggggctacaagaggtttttgtgtgggtcatgttggccctgaggcggccttaggcggccctttagctcttttacgcaatggagatgtaattgatatagatgccaaaaaagggactattaacgttagattaactaaatcacaattagccacaagacataagaagtggaaagcaaaaaaatcaagctttggatcgggtactatttggaaatatgctcaaacagtaggtcccgcttatttaggtgcaccaacacatcccggtaaaagaaaagaagtaaaagtttacgctgatatttaa

SEQ ID NO: 104 - protein, 572 aa, Candidatus Pelagibacter ubique
MAKFNKKKLPSRHTSLGADRAPHRSFYYAMGETEKDVAKPFVGVVSTWNEAAPCNIALMRQAQSVKKGVRASGGTPREFCTITVTDGIAMGHEGMKSSLISREVIADSTELTVRGHCYDALVGIAGCDKSLPALMMAMVRLNVPSVFIYGGSILPGQYKGKDVTVVDVFEAVGKHSAGKMSAKELRKLELVACPSAGACGGQFTANTMACVSEAIGLALPYSAGTPAPYEERDKYALLSGKTVMNLLQKNIRPRDIVTKKSLENAATIVAATGGSTNAALHLPAIANEIGIKFDLMDVAKIFKKTPYLADLKPGGKYVAKDMWLAGGVPMLLKTLFDGGFIHGDCMTVTGKTMKQNLKNIKFNPKQKVLRAYDNPLSPDGGVVGLKGNLAPDGGIVKIAGLKKLQFTGKARCFDNEEAAMACVQKKKYKAGDVIIIRYEGPVGGPGMREMLSTTGAIYGQGMGEKVALITDGRFSGATRGFCVGHVGPEAALGGPLALLRNGDVIDIDAKKGTINVRLTKSQLATRHKKWKAKKSSFGSGTIWKYAQTVGPAYLGAPTHPGKRKEVKVYADI

SEQ ID NO: 105 - DNA, 1722 bp, Erythrobacter litoralis
atgtcgtcgagattcgacaagtccaagctgcccagccgccacgtttcggtcgggccagagcgcgcgccgcatcgttcgtattactacgcgatgggtctgaccgagcaggagatcgcgcgacccttcgtcggcattgttagcgcgggcaacgacagcgcgccctgcaacacgacgctcgatgcgcaggcggacatctgtcgcactggcgtcaaccaagcaggcggcatgccgcggcgcttcaacaccatcaccgtgacggacggtatcgccatgggacaccagggcatgaaaagctcgctggtcagccgcgaggtgattgcggactcgatcgagctatcggtgcgcgggcattgctatgatgcgctggtcggattcgccggctgcgacaagagcttgcccggcatgatgatggccatgctgcggctcaatgttccgagcatcttcgtctatggcggatcgatcctgccgggccgcttccacgacaaggacgtgaccgtcgtcgacgtgttcgaagcggtcggccagcacgcggcgggcaattgtccgctgaaagaactgaccgcgctggaaaaggtcgcctgtcccgggcacggcgcgtgcggcgggcagtttaccgccaacaccatggcctgcgtcggcgaagcgatcggcctgtcgctgcccaacagcaatatggcccccgcgccctatcgttcgcgcgaggagatcgcggtggcggcggggcggcaggtcatgacgctgctggagaaaaacctgcgcccgcgtgacatctgcacaagggccgcattcgagaatgcagcacgggtcgtcgcggcaacgggcggctcgaccaatgccgctttgcacctgcctgccatggcccatgaatgcggcatcgacttcgacctgttcgatgtcgccgagacattcaaatcaacaccttatatcgcagacctcaaacctggcgggcgctatgtcgccaaggacatgcacgaggcgggcggggtctacatggcgatgaaaacgctgctggagggcggtttcctcgatcccgaaccgatgaccgtcacaggcaagacgctgggcgagaatatcgaggagatcacctgggaccccgaccagaaggttttctacgacgtatccaatccgatcacgccgaccggcggcgtcgtcgggctcaggggttctctcgcgcccgacggggcgattgtgaaggtggcgggaatggaacggctccagttcagcggcccagcgcgagtattcgattgcgaggaggatgccttcaaggcggtcgagcagcgcgacatcgccgaaggttgcgtcatcgtaatccgctacgaaggccccaagggcggccccggcatgcgcgaaatgctctctactaccgcagcgctctacgggcagggcatgggcgagaaagtggcgctcatcaccgacgggcgcttctccggcgcgacgcgcggcttttgcatcggccatgtcggcccggaagcggcagactgcggcccgattgcgctggtcgaggatggcgatacaatcagcatcgatgccgttgcaggcacgattgagctcgacgtcgatgccgaaacgcttgaaaaacggcgtcaaagctggacaccgcgggcgaacgattaccagtccggcgcgctgtggcgctatgcgaggaacgtcggtcctgcgcatgagggcgcagtgactcatccgggagcgaaatcggaacgccatgtctttgcggatatctag

SEQ ID NO: 106 - protein, 573 aa, Erythrobacter litoralis
MSSRFDKSKLPSRHVSVGPERAPHRSYYYAMGLTEQEIARPFVGIVSAGNDSAPCNTTLDAQADICRTGVNQAGGMPRRFNTITVTDGIAMGHQGMKSSLVSREVIADSIELSVRGHCYDALVGFAGCDKSLPGMMMAMLRLNVPSIFVYGGSILPGRFHDKDVTVVDVFEAVGQHAAGNCPLKELTALEKVACPGHGACGGQFTANTMACVGEAIGLSLPNSNMAPAPYRSREEIAVAAGRQVMTLLEKNLRPRDICTRAAFENAARVVAATGGSTNAALHLPAMAHECGIDFDLFDVAETFKSTPYIADLKPGGRYVAKDMHEAGGVYMAMKTLLEGGFLDPEPMTVTGKTLGENIEEITWDPDQKVFYDVSNPITPTGGVVGLRGSLAPDGAIVKVAGMERLQFSGPARVFDCEEDAFKAVEQRDIAEGCVIVIRYEGPKGGPGMREMLSTTAALYGQGMGEKVALITDGRFSGATRGFCIGHVGPEAADCGPIALVEDGDTISIDAVAGTIELDVDAETLEKRRQSWTPRANDYQSGALWRYARNVGPAHEGAVTHPGAKSERHVFADI

SEQ ID NO: 107 - DNA, 1716 bp, Erythrobacter sp.
atgtccttcgataagtccaagttgccaagccgccatgtctcggtcgggcctgaacgcgcgccccaccgttcctactattacgcgatgggcatgaccgaggaagaaatcgcacgccccttcgtcgctgtggccagtgctggtaacgattccgcgccgtgcaacacaacgctcgatccgcaggcgaatatctgtcgcgaaggcgtcattgcggggggagggaccccgcgccgcttcaacaccatcacggttacggacgggatcgcgatgggccatcagggcatgaagagctcgctggtaagtcgcgaggtcattgcggactccgtcgagctttcggtgcgcggtcattgttacgatgcgcttgtaggatttgccggatgcgacaaaagcctgcccgggatgatgatggccatgctgcggctgaacgtgccgagcatctttgtctatggcggctcgatcctcccaggcactcatcgcggcaaggacgtgacggtcgtcgatgtgttcgaagccgtgggccagcatgctgccgggaattgcccgcttcaggagttgatcgagctcgaaaaggttgcctgtcccggacacggagcctgtggcggccagttcacagccaatacgatggcctgcgtgggtgaggcaatcggattgtcattgccgaacagcaacatggctcctgctccttacagatcgcgtgaagaaatcgctcgcgccgcgggcgagcaggtgatgatactgcttaagcaaaatctgcgcccacgcgacatctgcacgcgcgcggcctttgaaaacgcggcccgcgttgtcgccgcaaccggcggttctaccaatgccgctctgcaccttcctgccatggcgagcgaatgcgggattgatttcgatcttttcgacgttgcggagatcttcaaatcgacaccctacatcgccgacctgaagcccggcggtaagtacgtcgcaaaggacatgcacgaagcgggcggcgtctacatgggcatgaagacactgctcgaaggagggttcctcgatcccgggccgatgactgtgaccggcaagacgctgggcgagaacatcgaggagatcacctggaaccccgatcaaaaggtattctacgacgtaaagaacccgatcaccccgaccggcggtgtggttgggcttaagggctcgctcgcgcccgaaggtgcgatcgtaaaggttgccgggatggaacgtttgcaattcaccggcacggctcgcgtattcgaatgcgaggaagatgccttcgaggcggtcgagaagcgcgacattgtcgaaggcagcgtcatcgtcatccgctacgaaggccccaagggtggacctggaatgcgcgagatgctcgccaccaccgctgcgctttacggccagggtatgggtgagaaagtcgccctcatcacagatgggcggttctcaggcgctacgcgtggtttctgtatcggccatgtcggccctgaagccgcggatggcggaccgatcgctctcgtcgaggatggcgacacgatcagcatcgatgccgagcttggcacgatcgacctggaggtcgaccaaagcgtgcttgaagaacgccgaaaagcatggaagccgcgtacgaacgattatcagtcgggggcgctgtggcgttacgcgcagaatgtcgggtccgcacgaaacggagcgctcactcacccgggcgccaagtctgagacccatgtgtttgcggacatctag

SEQ ID NO: 108 - protein, 571 aa, Erythrobacter sp.
MSFDKSKLPSRHVSVGPERAPHRSYYYAMGMTEEEIARPFVAVASAGNDSAPCNTTLDPQANICREGVIAGGGTPRRFNTITVTDGIAMGHQGMKSSLVSREVIADSVELSVRGHCYDALVGFAGCDKSLPGMMMAMLRLNVPSIFVYGGSILPGTHRGKDVTVVDVFEAVGQHAAGNCPLQELIELEKVACPGHGACGGQFTANTMACVGEAIGLSLPNSNMAPAPYRSREEIARAAGEQVMILLKQNLRPRDICTRAAFENAARVVAATGGSTNAALHLPAMASECGIDFDLFDVAEIFKSTPYIADLKPGGKYVAKDMHEAGGVYMGMKTLLEGGFLDPGPMTVTGKTLGENIEEITWNPDQKVFYDVKNPITPTGGVVGLKGSLAPEGAIVKVAGMERLQFTGTARVFECEEDAFEAVEKRDIVEGSVIVIRYEGPKGGPGMREMLATTAALYGQGMGEKVALITDGRFSGATRGFCIGHVGPEAADGGPIALVEDGDTISIDAELGTIDLEVDQSVLEERRKAWKPRTNDYQSGALWRYAQNVGSARNGALTHPGAKSETHVFADI

SEQ ID NO: 109 - DNA, 1815 bp, Comamonas testosteroni
atgaacgattcccgctccaccgatccccaggccgctgtcagcggccacgctgaaccctccgactcctctgtgtcatcctccgccccgggcctgcgctcggccatcgtgcaccgcggcaccttgcgcgccagcgcgcgcagctttctgcatgcgctgggccaggacgatgaggagattgcacgcccgcatgtgggcgtgttccatacgggcggggagatgagcccctgcaatatgaatctccgcgaccaggcccagcatgccaagaccggcatctacgcgggaggcggcatgccgcacgagtgccccgtggtctcggtcagcgacggcctgaccatggcgcattcgggcatgcgcttttcgctgatctcgcgcgagctcatcgccgacagcgtggaggcctcggtgcgcggccaccagtgggacggtatctttgccgtgggtgcctgcgacaagaacctgccgggcctgatgatggccatggtgcgctgcaatgtgcccagcgtcttcgtgcatggcggctcggccctgcccgggcagatgccgggcagcgtatcggggcgcgcccttaacgtggtcgacacctacgagaccataggcaaggtgctggccggcacttccaccatgcaggagctggacaccgtcacgcgctcctgcctgccctcggccggggcctgtgccgggcagttcacggccaacaccatgggcatggtcagcgaggccctgggcctggcgcccataggctccagcatggtgccggccgtgttcagcgaacgcgcgccgctgatgcgccgcgcgggccgtcagctcatggaaatggtgtgggccagcgccaggggagaggccgtgctgccgcgcgacatcgtcacgcgcaaggccctggaaaatgcctgtgccgtggtctgcgccacgggtggctccacgaatgcggccctgcacctgccggcgatcgcgcacgaggccggcatacgctttcacctcgacgacgtggccgagatctttgcgcgcacgccgctgatcgcagacctcaagcccggcggccgcttcctggcacgtgatgtctactacatcggcggtgcggctgtcatcctgcgcaccctgctggagcagggcctgctgcatggcgatgcactcaccttcacgggccgcacgctggccgaggaggtggccgatgctgccgagcccgacggcgaagtggtgcgcaaggccggcaacccgatctcggccgacggtgggctcacggtgctcaagggcaatctgtgccctgacggtgccctgctcaagacggcggggctcaagaccctggtgcaccgcggtccggcccgcgtcttcgactccgaggaacaggcgcaggacgccgtgcaggccatggcctaccggagcggcgatgtgctggtgatacgcaacgaaggccccaagggcagccccggcatgcgcgagatgctgggcatcactgccttgctctatggccagggcatgggcgacaaggtggcactgctcaccgacgggcgcttctcgggcgccacgcgcggcctgtgcataggctacgcggggccggaggccgctgacggtgggccgattgccgcactgcaggacggcgacatcatcgccatcgatgcgcgggccggcgcgcgcagcatcacggtggagctggagcccgccgtcattgccgcgcggctggaagccgcccgggccagccgtgcgcagcagcgccccctgggcgggctgctggagaaatacgcgctgaccgtgcgtcccgcccaccagggcgcggtcacgcattcgggggcggtgacctggctgcgcgacagcaagtga

SEQ ID NO: 110 - protein, 604 aa, Comamonas testosteroni
MNDSRSTDPQAAVSGHAEPSDSSVSSSAPGLRSAIVHRGTLRASARSFLHALGQDDEEIARPHVGVFHTGGEMSPCNMNLRDQAQHAKTGIYAGGGMPHECPVVSVSDGLTMAHSGMRFSLISRELIADSVEASVRGHQWDGIFAVGACDKNLPGLMMAMVRCNVPSVFVHGGSALPGQMPGSVSGRALNVVDTYETIGKVLAGTSTMQELDTVTRSCLPSAGACAGQFTANTMGMVSEALGLAPIGSSMVPAVFSERAPLMRRAGRQLMEMVWASARGEAVLPRDIVTRKALENACAVVCATGGSTNAALHLPAIAHEAGIRFHLDDVAEIFARTPLIADLKPGGRFLARDVYYIGGAAVILRTLLEQGLLHGDALTFTGRTLAEEVADAAEPDGEVVRKAGNPISADGGLTVLKGNLCPDGALLKTAGLKTLVHRGPARVFDSEEQAQDAVQAMAYRSGDVLVIRNEGPKGSPGMREMLGITALLYGQGMGDKVALLTDGRFSGATRGLCIGYAGPEAADGGPIAALQDGDIIAIDARAGARSITVELEPAVIAARLEAARASRAQQRPLGGLLEKYALTVRPAHQGAVTHSGAVTWLRDSK

SEQ ID NO: 111 - DNA, 1707 bp, Sphingomonas wittichii
atgacgacccgaaaatttcgatccgagatcatccgcgaaggcgtggtccgaacgaccacgcgcagcttcctctacgccctgggcgaggacgacgaggatctgcggcagcctcatgtcgccgtcatccacaccggcggcgagatgagcccgtgcaacaccacgctgcgcgatcaggcgctccacgccaagacgggcatctatgcgggtggcggcacggcgcatgaatgcccggtggtgtcggtgtcggacgggctgtcggtggcgcattcggggatgcgcttctcgctgatctcgcgcgagctgatcgccgacagcgtggaggcgaccgtccggagccatcaatgggatggcgtcctcgcggtcggcggctgcgacaagaacatgcccggcctgatgatgggcatcgtgcgctgcaacgtcccctcggtcttcctctatggtggggcagccctgcccggccatctcggcggccgcgacgtcaacatcgtcgacacctatgagatgatcggccgggtcctggcgggagaggcgacgcaaggggaactggaggacatggcccgcgcctgtcttccgacggcgggagcctgtgccggccaatataccgccaacaccatgggcatggtgtcggaagcgctcggcctggcgctgctgggctcctcgatgatcccggcggtctatgccgcccgggcgccgatggcgcgcaaggcgggcaaggtgctgatgcgagcggtgctcggcggtgggccgctgccgcgcgacatcgtcacccgcaaggcgctggaaaatgcctgcgccgtggtcgccgccaccggcggttcgaccaacgcgccgctgcaccttcccgcgatcgccaacgaagcggggatcgatttcgacctcgacgatgtcgccgcagtgctcgcccgcacgccgctgatcgccgatctcaagcccggcggccgcttcctggccaaggacgtgttcgagatcggcggcaccccggtgatcctgaaggccctgctcgacggcggccatctccatggcgactgcatgacggtcaccgggcggacgctcgccgaagacctcgccaaggtctgcccgccggacggggcggtggtccgcgactgcggcatgccgatcgcgccgtccggcggcgtgaccgtgctcaagggcaatctggccccagacggcgcactgctgaagaccgccggcctgaagaagctcgagcatcgcggccccgcccgcgtcttcgagtccgaggagcaatgcctctccgccgtgcgggcgatggcctatgcggccggcgacgtcatcgtgatccgcaacgaagggccgcgcggcggccccggtatgcgcgagatgctgggcatcaccgcgctgctctacggccagggcatgggggagaaagtcgccctgatcacggacggccgcttctcgggcgcgacccggggcatgtgcatcggctatatctcgcccgaagcggccagtgatggaccgatcggcctggtccgcgacggtgatctcatcgccatcgacgcgcgcgacggcatcgtcagtttgcaggtcgaactgccaaaaggtgagttggaggcgcgtcgcgccctgccccgccccgcccgtgttcgtccgaaaggaggggtcctcgaaaaatatgcggcgatcgttggaccggccaacaagggcgccgtaacccatagcggcaacgtcatatgggagatggatccgtga

SEQ ID NO: 112 - protein, 568 aa, Sphingomonas wittichii
MTTRKFRSEIIREGVVRTTTRSFLYALGEDDEDLRQPHVAVIHTGGEMSPCNTTLRDQALHAKTGIYAGGGTAHECPVVSVSDGLSVAHSGMRFSLISRELIADSVEATVRSHQWDGVLAVGGCDKNMPGLMMGIVRCNVPSVFLYGGAALPGHLGGRDVNIVDTYEMIGRVLAGEATQGELEDMARACLPTAGACAGQYTANTMGMVSEALGLALLGSSMIPAVYAARAPMARKAGKVLMRAVLGGGPLPRDIVTRKALENACAVVAATGGSTNAPLHLPAIANEAGIDFDLDDVAAVLARTPLIADLKPGGRFLAKDVFEIGGTPVILKALLDGGHLHGDCMTVTGRTLAEDLAKVCPPDGAVVRDCGMPIAPSGGVTVLKGNLAPDGALLKTAGLKKLEHRGPARVFESEEQCLSAVRAMAYAAGDVIVIRNEGPRGGPGMREMLGITALLYGQGMGEKVALITDGRFSGATRGMCIGYISPEAASDGPIGLVRDGDLIAIDARDGIVSLQVELPKGELEARRALPRPARVRPKGGVLEKYAAIVGPANKGAVTHSGNVIWEMDP

SEQ ID NO: 113 - DNA, 1767 bp, Burkholderia xenovorans
atgaccaatctgcataaacaccgctcccgcatggtgaccgatggtgtgacgcgtgcgccgcaccgtgcctttctgcgcgcgacaggcctcgacgatgcgtcgatgcaaaagccgttcgtcgcgatcgtcgatacgtttggcgagaacacgccgtgttcgatgtcgctgaaccaggtgtccgataacgcacgtctcggcgttgccgctggcggcggcataccgattcgcggctcggcgatctcggtgtcggacggtacctcgatgaatcattcggggatgcgcatgagccttgtatcgcgcgagatcgtcgcggacagcgtcgagctgttcgtgcgtgcccatgcctacgatgcgctgatcggcgtggccggctgcgacaagacgctgcccggcatcctgatgggcatggttcgcgtcaacgtgcccggcgcgttcctgttcggcggcgcgatgctgccgggcgtggcgcccgggcagatccccggcggaggcggcacgggccagcaacgccaggcaacgatcctcacgaccatcgaagcggtgggcaccgcgcagcgcggcgacatcacccgcgcgcagctcgacgccatcgaaaagcagtgcacgccgaccgccggctcatgtcccggccagttcaccgcgaacaccatggcgatggtcgcggaagcgctgggactcgccccgctcggctcggcgatggtgccggccgtctatagcgaacgcattgcgattgcgcggcgcgctggcgaaacggtgatgcgcacgctcaaggaaggcgccccgctgccacgcgatctggttacgctgaaaagcctggagaatgcctgcgccgccgttgccgcgacgggcggctcgaccaacgccgcgctgcacattccggcgatcgcgcatgaagccggcatccgcttcacgctcgacgacgtgcagcgcgtgttcgcgcgcattccgctgatcggcgacctgcagcccggcggccgctatctcgcgcaggacctgcatcatgcgggcggcgtgccggcggtgctcaacgcgttgctggccggtggctatctgcatggcgacgccctcacgctcgacggcctcacgctggaagacgcgttgcgcggctacgccggtcccgatggcacggtggtgcgttcatgcgatgaaccgctcggcgagaacggcggcctcgtgatcctgcgcggcaatctcgcaccggacggtgcgtgcctgaaaatcgccgggctcaaagcgctgaccttctcaggtaagacgcgcatcttcgaatgcgaggaagactgcatggcggtggtcgctgcacgcgattatcgcgaaggcgacgtcctcgtgatccgcaacgaagggccgaagggcggtcccggcatgcgggagatgctcagcgtgaccgcggcgatctacggacaaggcatgggcgagaaagtcgcgctgctgaccgatggacgcttttcgggggcgacgcgcggcatgtgtatcggttatgtcggaccggaagcggcggtgggcggtccgattgcgctgctgcgcgatggtgatcgggtgcagatcgatgcgcgcgcgggaacgctgcgcgtcgagctatccgacgacgaactcgcgcgacgccgtgcggatctgccggcgaggccaaggcgccggctcgccggcgtgctggagaagtacgaggcgctggtgcggcctgcgcatctcggggcggtcacgcattcgggcaatctcgattggccctacgatgcgccgacgcatggcgacgacggagccgccgcgtga

SEQ ID NO: 114 - protein, 588 aa, Burkholderia xenovorans
MTNLHKHRSRMVTDGVTRAPHRAFLRATGLDDASMQKPFVAIVDTFGENTPCSMSLNQVSDNARLGVAAGGGIPIRGSAISVSDGTSMNHSGMRMSLVSREIVADSVELFVRAHAYDALIGVAGCDKTLPGILMGMVRVNVPGAFLFGGAMLPGVAPGQIPGGGGTGQQRQATILTTIEAVGTAQRGDITRAQLDAIEKQCTPTAGSCPGQFTANTMAMVAEALGLAPLGSAMVPAVYSERIAIARRAGETVMRTLKEGAPLPRDLVTLKSLENACAAVAATGGSTNAALHIPAIAHEAGIRFTLDDVQRVFARIPLIGDLQPGGRYLAQDLHHAGGVPAVLNALLAGGYLHGDALTLDGLTLEDALRGYAGPDGTVVRSCDEPLGENGGLVILRGNLAPDGACLKIAGLKALTFSGKTRIFECEEDCMAVVAARDYREGDVLVIRNEGPKGGPGMREMLSVTAAIYGQGMGEKVALLTDGRFSGATRGMCIGYVGPEAAVGGPIALLRDGDRVQIDARAGTLRVELSDDELARRRADLPARPRRRLAGVLEKYEALVRPAHLGAVTHSGNLDWPYDAPTHGDDGAAA

SEQ ID NO: 115 - DNA, 1767 bp, Burkholderia phytofirmans
atgaccaatctgcacaaacatcgctcgcgcagggtgaccgacggcgtcacccgcgcgccgcatcgcgcgttccttcgcgctaccggcctcgacgacgaatccatgcaaaagccgttcgtcgcgatcgtcgatacgttcggcgagaacaccccgtgttcgatgtcgctgaaccaggtctccgacaacgtgcgcctcggcattgcagcgggcggtggcgtgccgatccgcggctcggcgatctcggtgtcggacggcacgtcgatgaatcactccggcatgaggatgagcctcgtgtcgcgcgaagtggtcgcggacagcgtcgaactgttcgtgcgtgcgcataactacgacgcactgatcggcgtcgccggttgcgacaagaccttgcccggcatcctgatgggcatggtgcgcgtcaacgtgcccggtgtgttcctgttcggcggcgcaatgctgcccggcgtcgcacccggtcagttgcccggcggcgccggcaccggcctgcaacgccagtcgacgattctcacgacaatcgaagcggtcggcaccacgcagcgtggcgacatgagccgcgcgcaacttgacgccatcgaaaaacaatgcacgccgactgccggatcgtgtcccggccagttcaccgcgaataccatggcgatggtcgcggaaacgcttggcctcgcgccgctgggctccgcgatggtgcccgccgtctacagcgaacggattgcgattgcgcgccgcgccggcgagacagtcatgcgtatcctgacgcaaggcgggcccttgccgcgcgatctcgttacgatggaaagcctggagaacgcctgcgcggcagttgccgcgaccggcggttcgaccaatgccgcgctgcacattccggccatcgcgaacgaggccggcattcgcttcgcgctggacgacgtgcaacgcgtgttcgcgaaaattccgctgatcggcgatctgcaaccaggcggccgctatctcgcgcaggatctgcatcacgcgggcggcgtgccggccgtgttgaacgcgctgctggcaggcggcttcctgcatggcgatgtgcccgcgttcggcggcggcacgctcgccgaagcattgagcgcgttcagcggaccggacggcatcgtcgtgcgtccgtgcgacgagccgctcggcgaaaacggcggactcgtgatcctgcgtggcaacctcgcgccggacggcgcatgtctgaaaatcgccgggctcaaatcgctttcgttcacgggcgcggtgcgtgtattcgaatgcgaagaagactgcatggcggttgtcgcggcgcgcgactaccgcgaaggcgacgtgctcgtgatccgtaacgaagggccgaaaggcggtcccggtatgcgcgaaatgctgggtgtgacagcagcgatctacggtcagggcatgggcgagaaagtggcgttgttgaccgacggtcggttttcgggcgcgacacgtggcatgtgcatcggctatgtcggcccggaagcggcggcgggtggcccgatcggcctgttgcgcaatgacgaccgcgtgcatatcgacgcgcgcgcaggcattctgcgcgtcgacctgtccgacgacgaactcgcccgtcgccgcgccgacgcgccagcgcgcgcgtcgcgccggctcgcgggggtgctcgaaaaatacgaagcgttggtgcggcccgcgcatctcggcgcggtgacgcattcgggcaacgttgaatggccatacgacgaacccacgcccggcgacgacggagccgccgcatga

SEQ ID NO: 116 - protein, 588 aa, Burkholderia phytofirmans
MTNLHKHRSRRVTDGVTRAPHRAFLRATGLDDESMQKPFVAIVDTFGENTPCSMSLNQVSDNVRLGIAAGGGVPIRGSAISVSDGTSMNHSGMRMSLVSREVVADSVELFVRAHNYDALIGVAGCDKTLPGILMGMVRVNVPGVFLFGGAMLPGVAPGQLPGGAGTGLQRQSTILTTIEAVGTTQRGDMSRAQLDAIEKQCTPTAGSCPGQFTANTMAMVAETLGLAPLGSAMVPAVYSERIAIARRAGETVMRILTQGGPLPRDLVTMESLENACAAVAATGGSTNAALHIPAIANEAGIRFALDDVQRVFAKIPLIGDLQPGGRYLAQDLHHAGGVPAVLNALLAGGFLHGDVPAFGGGTLAEALSAFSGPDGIVVRPCDEPLGENGGLVILRGNLAPDGACLKIAGLKSLSFTGAVRVFECEEDCMAVVAARDYREGDVLVIRNEGPKGGPGMREMLGVTAAIYGQGMGEKVALLTDGRFSGATRGMCIGYVGPEAAAGGPIGLLRNDDRVHIDARAGILRVDLSDDELARRRADAPARASRRLAGVLEKYEALVRPAHLGAVTHSGNVEWPYDEPTPGDDGAAA

SEQ ID NO: 117 - DNA, 1713 bp, Bordetella petrii
atgtcactgcacaaacaccgctcgcggatggtcaccgacggcctgacccgggcgcctcaccgggcctttctgcgcgccaccgggttcgacgacgaagccctgaagaaatcaatcgttggcattgtcagtacccaaggcgaaaacacgccctgctcgatggccctggcgccccaggcggaccgcgcccgcctgggcgtggcggccgggggcggcgtgccggtcagtttttcgaccatttcggtgtcggatggcacgtccatgaaccatgccggcatgcgcatgagcctgctttcgcgcgaggcgatcgccgacagcgtggaaatggtgatgcgcggccacgcctatgacggactggtggcgttcgccggctgcgacaagacgctgcccgccatgatgatggcgatcgtgcgcctgaacgtgccggcggtgtttctctacggcggcgcgacgttgcccggccacgcgctcggcaagcaggccaccatcctggacaccatcgaggcagtgggccgcgtgcagcatggcggcatgacggccgccgagctcaagaccatggagcgtacttgcacgccatcggccggctcgtgcccgggccaattcaccgccaacaccatggccatggtcggagaagccctgggcttgtcgcccctgggcaccgccatgatgcccgcggtgtacagcgaacgcctggccatcgcccagcgggccggcgaacaagtcatgcgcgccctggcccaaggcggccccctgccgcgcgacctggtcacgcgcgccagcctggacaatgcctgcgccgcggtggctgccaccggcggctcgaccaacgcggcgctgcacattcccgccatcgctcacgaagccggcatccgctacacgctggatgacgttgccgccgtattccagcgcacgccattgatcgcggacttgcagccgggcggacgcttcctggcgcgcgacctgcacgaagcgggcggcgtgcccgccgtactgaaagccctgctggaaggcggttatatcgacggcaacgtgccgacgctcgacggccggccgctggcgcgagccctggtcgacttcgccgggccggacggcgaggtggtgcgcccctgctcgcgcgcgatccacccttcgggcggcgtcacggtgctgaaaggcaacctcagcccgcaaggcgcgctgctcaagatcgcgggcctgaaatcgctgcaattctccgggccggcgcgcgtgttcgaaaacgaagaagactgcatgcgcgcggtgtcacagcgcacctaccagcccggcgacgtgctggtcatccgcaacgaaggcccccagggcgggccgggcatgagagagatgctcagcgtgaccgccgcactgtatggacagggcatgggcgaaaaagtggccctgctgaccgacggccgcttctcgggcgcgacgcgcgggctgtgcatcggttatgtgggccccgaggccgcggcgggcggccccatcgccttcgttcgcgacggcgacatcatccatatcgacgcccaggccaataccttgcgcgtcgaactcagcgacgccgaactggccgcccgccgcgccagccatgtgccgccggcacggccgcgcctggccggcgcgctcgaaaaatacgccttgctggtgcggccggcgcacgaaggcgccgtcacgcactcggggggattggattggccctacgaaaccccggaggccgaatga

SEQ ID NO: 118 - protein, 570 aa, Bordetella petrii
MSLHKHRSRMVTDGLTRAPHRAFLRATGFDDEALKKSIVGIVSTQGENTPCSMALAPQADRARLGVAAGGGVPVSFSTISVSDGTSMNHAGMRMSLLSREAIADSVEMVMRGHAYDGLVAFAGCDKTLPAMMMAIVRLNVPAVFLYGGATLPGHALGKQATILDTIEAVGRVQHGGMTAAELKTMERTCTPSAGSCPGQFTANTMAMVGEALGLSPLGTAMMPAVYSERLAIAQRAGEQVMRALAQGGPLPRDLVTRASLDNACAAVAATGGSTNAALHIPAIAHEAGIRYTLDDVAAVFQRTPLIADLQPGGRFLARDLHEAGGVPAVLKALLEGGYIDGNVPTLDGRPLARALVDFAGPDGEVVRPCSRAIHPSGGVTVLKGNLSPQGALLKIAGLKSLQFSGPARVFENEEDCMRAVSQRTYQPGDVLVIRNEGPQGGPGMREMLSVTAALYGQGMGEKVALLTDGRFSGATRGLCIGYVGPEAAAGGPIAFVRDGDIIHIDAQANTLRVELSDAELAARRASHVPPARPRLAGALEKYALLVRPAHEGAVTHSGGLDWPYETPEAE

SEQ ID NO: 119 - DNA, 1713 bp, Bordetella bronchiseptica
atgtccctgcataagcaccgttcccgcatggttacccaaggcctgacgcgcaccccgcatcgcgccttcctgcgcgccaccggcttcgacgacgccgccctggagaaatccatggtcggcatcgtgagcacgcaaggcgagaacacgccctgctccatggcgctggggccgcaggccgaccgcgcccgcctgggcgtggccgccggcggcggcgtgccggtcagcttctcgaccatctcgatctccgacggcacctcgatgaaccatgcgggcatgcgcatgagcctgctgtcgcgcgagaccatcgccgacagcgtcgagctggtggtgcgcggccacgcctatgacgcactggtggcgttcgccggctgcgacaagacgctgccggccatgatgatggccatcgtgcggctgaacgtgccggcggtgttcctgtacggcggcgccaccctgcccggccatgcggccagcggccaggtcaccatcctcgacaccatcgaagccgtcggccgggtacagcacggcaccatgccggcggccgagctcaaggcgatggagcgcacctgtacgccctcggcgggctcgtgcccgggccagttcaccgccaacaccatggccatggtgggcgaggcgctgggcctgtcgccgctgggttcggcgatgatgcccgcggtctacagcgaacggctggccatcgcgcagcgcgccggcgagcacgtgatgcgcgccctggccgcgggcggcccgctgccgcgccagctggtgacgcgcgccagcctggagaacgcctgcgccgcggtggcggccaccggcggctcgaccaacgcggccctgcacattccggccatcgcgcacgaggccggcatcgccttcacgctggacgacgtggcccgggtgttcaagcgcacgccgctgatcgccgacctgcaacccggcggccgctatctggcgcgcgacctgcacgaggccggcggcgtgccggtggtgctcaaggcgctgctggacggcggccatatcgacggcagcgtgctgacgctcgacggccgcaccctggccgaggccctggccgacacgcccgcgcccgacggcaaggtggtgcgcgcctgcggccaggccctgcaccccaccggcggcgtcgccgtgctcaagggcaatctcagccccgatggcgcgctgctgaagatcgccggcctgaagtcgctgaaattctccgggccggcgcgcgtgttcgagaacgaggaagcctgcatgcgcgcggtgtccacgcacgcctaccagccgggcgaagtcctggtcatccgcaacgaaggcccccggggcgggccgggcatgcgcgagatgctcagcgtcacggccgccctgtatggacagggcatgggcgagaaagtggcgctgctgaccgacggccgcttctcgggcgccacgcgcggcctgtgcatcggctacgccgggccggaagcggccgccggcggccccatcgcgctgctgcgcgatggcgacatgatccacatcgacgccgaggccgatacgctggacgtggcgctgtccgacgaagagctggcgcggcgccgcgccgcctaccaggcgccgccgcaggcgcgcctggccggcgcgctggagaaatacgccgcgctggtgcgcccggcctgcctgggcgcggtcacccactccggccaggtcgattggccttacgaaacgccggaggccgaatga

SEQ ID NO: 120 - protein, 570 aa, Bordetella bronchiseptica
MSLHKHRSRMVTQGLTRTPHRAFLRATGFDDAALEKSMVGIVSTQGENTPCSMALGPQADRARLGVAAGGGVPVSFSTISISDGTSMNHAGMRMSLLSRETIADSVELVVRGHAYDALVAFAGCDKTLPAMMMAIVRLNVPAVFLYGGATLPGHAASGQVTILDTIEAVGRVQHGTMPAAELKAMERTCTPSAGSCPGQFTANTMAMVGEALGLSPLGSAMMPAVYSERLAIAQRAGEHVMRALAAGGPLPRQLVTRASLENACAAVAATGGSTNAALHIPAIAHEAGIAFTLDDVARVFKRTPLIADLQPGGRYLARDLHEAGGVPVVLKALLDGGHIDGSVLTLDGRTLAEALADTPAPDGKVVRACGQALHPTGGVAVLKGNLSPDGALLKIAGLKSLKFSGPARVFENEEACMRAVSTHAYQPGEVLVIRNEGPRGGPGMREMLSVTAALYGQGMGEKVALLTDGRFSGATRGLCIGYAGPEAAAGGPIALLRDGDMIHIDAEADTLDVALSDEELARRRAAYQAPPQARLAGALEKYAALVRPACLGAVTHSGQVDWPYETPEAE

SEQ ID NO: 121 - DNA, 1707 bp, Bradyrhizobium sp.
atgaggaagctgcgttcgcgcgtgacggtggaggggctcgaccgcgccccgcaccgcgccttcatgcgcgcgatgggcctcgatgacgccgacatcgccaagccgatgatcggaatcgtcagtcagaggggcgagcagacgccctgcaacatgacgcacgacttccaggtcgatgccgccaagaccggcatctccgagtccggcggcacgccgcgcgaattcgccaccgtctccgtctccgacggcatcagcatgaaccatgagggaatgaagttctctctgttctcccgcgagctgatcgccgattcgatcgaggccgtggtgcacggcctagcctatgacgcgctgatcggcttcggcggctgcgacaagaccttgcccggcgtgatgatgggtatggtccgctgcaacgtgccgtcgatcttcatctatggcggcagcgcgctgcccggcaagtaccagggcaagacgctcacggtgctcgactcctacgaagcggtcggcagctacatgaccggcgagatcgatgccgccacgctcgaaggcatcgagcgctcgtgcctgccgacgatcggcgcctgcgccggccagttcaccgcgaacaccatgggcatgctgtctgaggcgatgggcctgtcgatgcccaacgtctcgatgatccccggcgtctatgccgagcgcgcccatgtcgcgcgcgcagccgggcgcctgatcatgcagatgctcgccaacgatggcccgcggccgcgcgacatcgtcacccgcaaatccctggagaacggcgcggcgatcgtcgccgccaccggcggctcgaccaacgcggccctgcatctgcctgcgatcgcgaacgaggccggcatccgcttcacgctcgacgatgtcggcgaggtgttttcgcgcacgccgctgatcggcaatctcaggcccggcggcaagtatacggcgaaggacgtgtatgacatcggcggcgcggccgtcgtgatccgcgcgctgatcgacagcggccacatcgacggctcctgcatcacggtgaccggccgtacgctcgccgaggcctgcggcgcggccaatgcgccggatggcgaggtcgtgttcacgccggccaggccgatgatggccgacggcggcgtcgccgtgctcaagggcaatctcgcgccggatggtgcggtcatcaaggtcgccggtctcaagagcctggtgttcgagggccgcgcgcgcgtgtttgaagatgaagaagcctgcgtcgccgccgtccgcgcccgcaactaccaggcgggcgaggtgctgatcatccgtaacgaggggccggtcggcggccccggcatgcgcgagatgctcggcgtcaccgcgctgatctatggccagggcatgggcgagaaggtcgcgctgatcaccgacggccgcttctccggtgccacccgcggtttatgcatcggctacgtctcgccggaagccttcgtcggcggcccgctggcgctggtgcgtgatggcgatcccattcgcatcgatgcgaaagcgcgcacgctcgacgtgctgctcgacgagggcgagctcgccgcgcgtcgcagcgcgtggacgcagcggccgccgcggcatcgcgcgggagcgctggcgaaatacgcgaaactggtggggcaggcgccgctcggcgcggtcacgcatgagggaccggcggaatggccctggttcgatcaggagcaggaatga

SEQ ID NO: 122 - protein, 568 aa, Bradyrhizobium sp.
MRKLRSRVTVEGLDRAPHRAFMRAMGLDDADIAKPMIGIVSQRGEQTPCNMTHDFQVDAAKTGISESGGTPREFATVSVSDGISMNHEGMKFSLFSRELIADSIEAVVHGLAYDALIGFGGCDKTLPGVMMGMVRCNVPSIFIYGGSALPGKYQGKTLTVLDSYEAVGSYMTGEIDAATLEGIERSCLPTIGACAGQFTANTMGMLSEAMGLSMPNVSMIPGVYAERAHVARAAGRLIMQMLANDGPRPRDIVTRKSLENGAAIVAATGGSTNAALHLPAIANEAGIRFTLDDVGEVFSRTPLIGNLRPGGKYTAKDVYDIGGAAVVIRALIDSGHIDGSCITVTGRTLAEACGAANAPDGEVVFTPARPMMADGGVAVLKGNLAPDGAVIKVAGLKSLVFEGRARVFEDEEACVAAVRARNYQAGEVLIIRNEGPVGGPGMREMLGVTALIYGQGMGEKVALITDGRFSGATRGLCIGYVSPEAFVGGPLALVRDGDPIRIDAKARTLDVLLDEGELAARRSAWTQRPPRHRAGALAKYAKLVGQAPLGAVTHEGPAEWPWFDQEQE

SEQ ID NO: 123 - DNA, 1707 bp, Bradyrhizobium sp.
atgaggaagctgcgctcgcgcgtcacggtggaggggctcgatcgtgccccgcaccgcgccttcatgcgcgcgatggggctggatgatgccgacatcgccaagccgatgatcggcatcgtcagccagaagggcgagcagacgccctgcaacatgacgcacgacttccaggtcgacgccgccaagacgggcgtctccgaagccggtgggacgccgcgcgaattcgccaccatctcggtgtcggacggcatcagcatgaaccatgagggaatgaagttctctctgttctcgcgcgaactgatcgcggattcgatcgaggccgtggtccatggtctcgcttatgacgcgctgatcggctttggcggctgcgataagaccctgccgggcgtcatgatgggcatggttcgttgcaacgtgccgtcgatcttcatttatggcggcagcgctctgcctggcaagttccagggcaagacgctcacggtgctcgattcgtatgaagcggtcggcagctacatgaccggcgagatcgatgtcgcgacgctcgagggcatcgagcggtcgtgcctgcccaccatcggcgcctgcgccgggcagttcaccgccaacaccatgggcatgctgtccgaggcgatgggcctgtcgatgcccaacgtctcgatgatccccggcgtctatgccgagcgcgcccatgtcgcgcggcaggccggccggctgatcatgcagatgctggctcgtggtgggccgctgccacgcgatatcgtgacccgcaaggccctggagaacggtgcggcgatcgtcgccgccaccggcggctcgaccaatgccgcgctgcatctgccggcgatcgccaacgaagccggcatccgtttcacgctcgacgatgtcggcgaggtcttcgcccgcacgccgctgatcggcaatctccggccgggcgggaagtacaccgccaaggacgtctatgacatcggcggcgcggccgttgtgatccgcgcgctgatcgagagcggccatatcgacggctcctgcatgacggtgaccggccgcacgcttgccgaggactatggggccgccaatgcgcccgatggcgagatcgtgtttcatccggccagcccgatcatggcggagggcggcgtcgccgtgctcaagggcaatctggcgcctgacggcgcggtcatcaaggtggccggcctgaagaacctcgtattcgaggggcgggcccgcgtattcgaggatgaggaagcctgcgtcgccgccgtccgcgcgcgcaactatcaggcgggcgaggtactgatcatccgcaacgaggggccggtcggcggtcccggcatgcgcgaaatgctcggtgtgaccgcactgatctacggtcagggcatgggcgagaaggtggcgctgatcaccgacggccgcttctccggagcgacgcgcggcatgtgcattggctatgtctcgccggaagccttcgtcggcggtccgttggcgctgctgcgcgacggcgatccgattcgcatcgatgcaaaagcgcgcacgctcgacgtcctgctcgacgacgccgagctcgcggcccgtcgcgccgcgtggtcgcagcggccgccacggcatcgcgccggcgcgctggcgaaatatgccaagctcgtcggccaggcaccgctcggcgccgtgacgcatgaaggacccgcggactggccgtggttcgatcaggagcagaaatga

SEQ ID NO: 124 - protein, 568 aa, Bradyrhizobium sp.
MRKLRSRVTVEGLDRAPHRAFMRAMGLDDADIAKPMIGIVSQKGEQTPCNMTHDFQVDAAKTGVSEAGGTPREFATISVSDGISMNHEGMKFSLFSRELIADSIEAVVHGLAYDALIGFGGCDKTLPGVMMGMVRCNVPSIFIYGGSALPGKFQGKTLTVLDSYEAVGSYMTGEIDVATLEGIERSCLPTIGACAGQFTANTMGMLSEAMGLSMPNVSMIPGVYAERAHVARQAGRLIMQMLARGGPLPRDIVTRKALENGAAIVAATGGSTNAALHLPAIANEAGIRFTLDDVGEVFARTPLIGNLRPGGKYTAKDVYDIGGAAVVIRALIESGHIDGSCMTVTGRTLAEDYGAANAPDGEIVFHPASPIMAEGGVAVLKGNLAPDGAVIKVAGLKNLVFEGRARVFEDEEACVAAVRARNYQAGEVLIIRNEGPVGGPGMREMLGVTALIYGQGMGEKVALITDGRFSGATRGMCIGYVSPEAFVGGPLALLRDGDPIRIDAKARTLDVLLDDAELAARRAAWSQRPPRHRAGALAKYAKLVGQAPLGAVTHEGPADWPWFDQEQK

SEQ ID NO: 125 - DNA, 1749 bp, Bradyrhizobium japonicum
atgaagttgcgatgtcccgccgcgtacgggacatcgcacgtagatgatgcaaatatgaagaagttgcgatcacggataacgacagacggcctcgaccgggccccgcaccgcgcattcatgcgcgcaatggggctggacgatgcggcaatcgccaagcccatggtaggcattgtcagcatgaagggcgagcagacgccctgcaacatgacccacgacttccaggtggccgcggccaagacaggtattgaggaggccggcggcacgccgcgcgaattctcgaccgtgtcggtctctgacgggatcagcatgaatcacgagggaatgaagttctccctcttttcgcgcgagctgatcgccgactcgatcgaggctgtcgttcatggtctcgcctatgacgcgttgatcggatacggcggatgcgacaagacgcttcccggcgtgatgatgggcatggttcgttgcaacgtgccgtcgattttcatctacggcggcagttcgctgccggggcgcgtggacggacgaacgctgacagtgctcgactcctacgaggctgtcggcagcttcatgaccggagagatcgatagcgccacactggagcggatcgagcgcgcctgcctgccgaccatcggtgcgtgcgcgggccagtttactgcgaacaccatgggaatggtgtcggaggcgatggggctcaccattcccaacgtctcgatggtgcccggtgtctacgccgagcgcgcgcagatctcgcgacgcgccgggcggctgatcatggaaatgctggaacgcggtgggccgctgccacgggacatcgtgacgcggaaatccctcgagaacggggcggcgatcgtcgccgctacgggcggctcgaccaacgccgcgctgcatctgcccgccatcgcgaacgaggccggcatcgcattcacgatcgacgatgtcggcgaggtctttgccaggacgccgctgatcggaaatctgcggcccggaggcaaatacacggcgaaggatgtccacgacataggtggcgccgccgtggtgatccaggagttgatcagaaccggtcatatcgacggtaactgcatcaccatcaccggccggacgcttgccgaagaatatggcgcggccaacgcgccggacggtgaggtcgtttacgcggcaagtgcgccgatcatgccggatggcggtgtcgcggtgctgaagggcaacctctgtccggacggtgcggtcatcaaggtcgcaggtttgaagagccagttcttcgagggtgtcgcgcgcgttttcgaagacgaggaggcttgcgtcgcagcggttcgcgaccgcagctacaaggcaggtgaggtcctggtgatccgcaacgaagggccggtcggcggccccggtatgcgcgagatgctcggcgtcaccgcgctgatctacgggcagggcatgggcgaaaaggtggccctgatcaccgacgggcggttctccggcgcgacccgcggcatgtgtatcggctacgtgtcccccgaagcattcgttggcggtccgttggccctcgttcgcgacggcgacaagatccggattgatgctacaaaccggcgtatggatatgctggtcgacgagccggagctcgcggcgcgccgacgtgattggaaaccacgcccgccgcgtcaccgcgcaggcgcgctcgcaaaatatgcgcgactggtcggccaggcgccgggcggagcggttacccatgaggggcccgcagaatggccctggttcgaatga

SEQ ID NO: 126 - protein, 582 aa, Bradyrhizobium japonicum
MKLRCPAAYGTSHVDDANMKKLRSRITTDGLDRAPHRAFMRAMGLDDAAIAKPMVGIVSMKGEQTPCNMTHDFQVAAAKTGIEEAGGTPREFSTVSVSDGISMNHEGMKFSLFSRELIADSIEAVVHGLAYDALIGYGGCDKTLPGVMMGMVRCNVPSIFIYGGSSLPGRVDGRTLTVLDSYEAVGSFMTGEIDSATLERIERACLPTIGACAGQFTANTMGMVSEAMGLTIPNVSMVPGVYAERAQISRRAGRLIMEMLERGGPLPRDIVTRKSLENGAAIVAATGGSTNAALHLPAIANEAGIAFTIDDVGEVFARTPLIGNLRPGGKYTAKDVHDIGGAAVVIQELIRTGHIDGNCITITGRTLAEEYGAANAPDGEVVYAASAPIMPDGGVAVLKGNLCPDGAVIKVAGLKSQFFEGVARVFEDEEACVAAVRDRSYKAGEVLVIRNEGPVGGPGMREMLGVTALIYGQGMGEKVALITDGRFSGATRGMCIGYVSPEAFVGGPLALVRDGDKIRIDATNRRMDMLVDEPELAARRRDWKPRPPRHRAGALAKYARLVGQAPGGAVTHEGPAEWPWFE

SEQ ID NO: 127 - DNA, 1686 bp, Sphingomonas wittichii
atggcgttgaaggacgggaagggcgagacgcttccctcgcggacgatcaccgacgggctcgaccgcgccccgcaccgcgccttcctgcgggcgatggggcatgacgacgtggcgatcggccagcccttcgcgggcatcgtctcgaccggggcgtcggtgacgccctgctcgatgtcgctggcgcctcaggccgaggcggcgaaggccgggctccaggcggcgggggtgacgccgttcgaattctcgacgatcaccgtcgccgacagcatgtcgatgaaccatgccgggatgcgtttcagcctggtctcgcgggagatcatcgccgattcgatcgaggcggtgacgcgggcgcatggctatgacgggctgatcggcttcgcggcctgcgacaagacgttgccgggcacgatgatggggatgatccgggtcaaccgcccgtcggtgttcgtctatggcggcgcggcgctgcccggccgctggcaggggcgcgacatcggcatcgtcgacgtctatgagggcgtcggccgggtctatgccggcgagatggacgaggccgagctgacgcgcctcgaaaaggcgggggtgccgaccgtcggctcctgcgccgggcagttcaccgccaacaccatggcgatggtcgccgagacgctgggcctggcgctgccgcgcagcgcgatgatgccggcggtggcgagcgagcgccgcgcgctggccgaggaatcgggccgcgtgctcggccggctgatccgcgagggcggcccgcgcccgcgcgacctcgtcacccgtcgcagcctcgaaaacgccgccgccaccgttgccgccaccggcggctcgaccaacgccgcgctgcacctgccggcgatcgcacatgaggcaggcatatccttcaccatggaggacatcgccgcgatcttcgaccgcaccccgctgctcgccgacctcaagcccggcggccgcttctgggcgcgcgacctgcacgaggtcggcggcgtgccgaccgtgctgcgggcgatgctggaggcgggcgtgctgcacggcgactgcccgaccatcaccggccggacgatcggcgagatcgccgccgccgcgcccgcgccggacggggaggtggtgcgccccgccgaccggccgatcgcgccgaccggcggggtgatcgtgctgcgcggcagcctcgcccccgacggcgcgatgctcaaggtcgccgggctcaagcgcctgtcgcacgaagggccggcgcgggtgttcgacggcgaggaggcggcggtcgacgcggtccgccggcaggattaccagccgggcgacgtcatcgtcatccgtggcgaggggccgaagggcggccccggcatgcgtgagatgctgggcgtcaccgcgctgatctacggccagggcatgggcgaacaggtcgcgctgctcaccgacggccgcttctcgggcgcgacgcgcggcatgtgcatcggccatgtcggcccggaggcctcggccggcggcccgctcgcgctggtccgggacggcgatcgcatccgcatcgacgcgggccagcgcacgctcgacctgctcgtcgatgccgccgagctggagcgccgccgcgcggcctggaccgcgccggaggctaccgtcacctcgccgaccttgcgcaaatatgcgcggctcgtcgggccggcgcatctcggcgccgtcacccactga

SEQ ID NO: 128 - protein, 561 aa, Sphingomonas wittichii
MALKDGKGETLPSRTITDGLDRAPHRAFLRAMGHDDVAIGQPFAGIVSTGASVTPCSMSLAPQAEAAKAGLQAAGVTPFEFSTITVADSMSMNHAGMRFSLVSREIIADSIEAVTRAHGYDGLIGFAACDKTLPGTMMGMIRVNRPSVFVYGGAALPGRWQGRDIGIVDVYEGVGRVYAGEMDEAELTRLEKAGVPTVGSCAGQFTANTMAMVAETLGLALPRSAMMPAVASERRALAEESGRVLGRLIREGGPRPRDLVTRRSLENAAATVAATGGSTNAALHLPAIAHEAGISFTMEDIAAIFDRTPLLADLKPGGRFWARDLHEVGGVPTVLRAMLEAGVLHGDCPTITGRTIGEIAAAAPAPDGEVVRPADRPIAPTGGVIVLRGSLAPDGAMLKVAGLKRLSHEGPARVFDGEEAAVDAVRRQDYQPGDVIVIRGEGPKGGPGMREMLGVTALIYGQGMGEQVALLTDGRFSGATRGMCIGHVGPEASAGGPLALVRDGDRIRIDAGQRTLDLLVDAAELERRRAAWTAPEATVTSPTLRKYARLVGPAHLGAVTH

SEQ ID NO: 129 - DNA, 1683 bp, Rhodobacterales bacterium
atgaccaaacgcgacacgctcatctcacgcaccatcgtggaggggctcgaccgtgcgccccaccgcgccttcctgcgcgcgatggggcacgacgacacggcactggccagcccgttcgtcggcatcgcacataccgcgagcgaggtgacgccctgcaccatgtcgctcccgccgcagatccagtcggccaagttaggcatcacccgcgaaggaatgaccccgttcgaattcggcacgatcaccgtggccgacagcatgtcgatgaaccatcgcgggatgcgcttttcgctcgtctcgcgtgagatcatcgcggacagcatcgacgcagtggtgcgcggccatgcctatgacgggctgatgaccttcgcctcctgcgacaagacgctgccgggcatgttgatggccatcgcgcgcatcaaccgcccttcggtctttctgtatggcggggccgcgctgccgacgccgtggaacgggcaggacatcggggtggtcgacgtctacgaaggcgtggggcgcgtctatgaggggacatcgagcgaggaagagctcgacgcgatggaacgggtgggcgtgcccactgtcggctcctgcgccgggcagttcacggccaacaccatggcgctcgtggccgaggttctgggcttggcccccctcggtgtcgcctaccttcccgccgtctattccgaacggcaggcactggtgaaacgcgcggcgggtctgttgcgccgcgcggtggacgagaacggcccgctgccctcggacctcatcacgcgcgagtcgctggaaaacgccgtggtcgctgtgggcgcgacgggcgggtcgaccaatgccctcctgcacctgcccgcaatcgcgaacgaggtcgggatcagcttcacgctggacgacatcgcgaaggtgcttgaggacgtgccgctggtcgccgacctgaaacccggcggcgcctactgggcgcgcgacatgcaccacgtgggcagcaccccggcgctcctgcgcgtgttgaagggggcgggcgtgctgcacacggacacgccgagtgtcgagggccggacgctgggtgaactggccgacaccggacctgaagcggacggcaaggtgatccgagccgtgggcaatccggtcacgccgacctcaggcgtggtggtgctcaaggggtcgctcgcccccgaaggggcggtgctcaaggtcgcgggtctcaagcacacagttcacgaaggccccgcgcgggtgttcgagtgcgaggaggatgccgtggccgccgtgcgcaagcgcgaatacgaggcgggcgacgtgattgtgatccgcaacgaaggccccaagggcgggccggggatgcgcgagatgctgggcgtcaccgcgctcctctacggtcagggcatgggcgagaaggtcgcgctcatcaccgacggccgcttctcaggcgcgacgcggggtctgtgcatcggtcacgtcgggcccgaggcggcggcgggtggtcccatcggcctgatccgcaccggcgacatcatccagatcgacgcgggcaaacgggagttgaacgtcaaactatcgacagacgagcttgcccggcgcacccgccccccggtgcccgaggggctggaacccgaaacggcgaccctgcgcaaatacgcggctctcgtcggccccgcgcatctgggcgcgaccacgcaccggaacacctag

SEQ ID NO: 130 - protein, 560 aa, Rhodobacterales bacterium
MTKRDTLISRTIVEGLDRAPHRAFLRAMGHDDTALASPFVGIAHTASEVTPCTMSLPPQIQSAKLGITREGMTPFEFGTITVADSMSMNHRGMRFSLVSREIIADSIDAVVRGHAYDGLMTFASCDKTLPGMLMAIARINRPSVFLYGGAALPTPWNGQDIGVVDVYEGVGRVYEGTSSEEELDAMERVGVPTVGSCAGQFTANTMALVAEVLGLAPLGVAYLPAVYSERQALVKRAAGLLRRAVDENGPLPSDLITRESLENAVVAVGATGGSTNALLHLPAIANEVGISFTLDDIAKVLEDVPLVADLKPGGAYWARDMHHVGSTPALLRVLKGAGVLHTDTPSVEGRTLGELADTGPEADGKVIRAVGNPVTPTSGVVVLKGSLAPEGAVLKVAGLKHTVHEGPARVFECEEDAVAAVRKREYEAGDVIVIRNEGPKGGPGMREMLGVTALLYGQGMGEKVALITDGRFSGATRGLCIGHVGPEAAAGGPIGLIRTGDIIQIDAGKRELNVKLSTDELARRTRPPVPEGLEPETATLRKYAALVGPAHLGATTHRNT

SEQ ID NO: 131 - DNA, 1665 bp, Solibacter usitatus
atgaaactgcagagccataccatcactcagggacgagatcgcgccccggcgcgcgccatgttgaaagcgatcgggtttaccgatgaagatctggccaagccgatcatcgggatcgccaacacctggatcgagaccatgccgtgcaattacaacctgcgtgagctggccggcaaagtgaaggagggcatccgcgccgccggcgggacgccgatggagttcaacaccatcgcgatcagcgacggcgtcaccatgggcacggaaggcatgaaggcctcgctgatcagccgtgaagtaatcgcggattccatcgagctgatggtgcgcggccacatgttcgatggcatcgtcgccatggtggcctgtgacaagaccattcccggcgccgcgatggcgctgctccgcctcaacgtcccgggcgtggtgctttatggcggcaccatcatgccgggccgcttcgagggtcacgacatcacgattcaggacgtgtttgaagccgtcggcgcgcacgcgcgcggcaagatcaccgacgcgcaattgctcgacatcgaagaccacgcctgccccggcgccggagcctgcggcggacagttcacggccaacaccatggccaccgtgatggagctgatcggactctccccgatgggcacggctgccgttccccaggtggacaagcgcaaagacgcagtggcgtaccgctgcggcgaggttattctgaacgccgtgcgcaagaacattctgccgcgcgatatttgcacccgcaaagccttcgagaatgcgattgcaggcgtcgccggaacggccgggtccaccaacgccgtgctgcacctgctggccatggcgcgcgaagccgaagtgccgctgaccatcgatgagtttgaaccggtgctggcgcggacgccggtcttcgtcgatatcaaacccggcggaaagtacatggccgcggacgtggataaggccggcggcattccggtgatcgccaaccgcctgctcgagggcggctacgtggatggctcggcgatcacgatcaccggacgcaccttcgccgaagaagcgaacgaggccaaggaagtcgccgggcagccggtgattcttccgctcgccaaagcgctcaagccgcgcggcggtatcgcgattcttcgcggctctctggcgcccgaaggctgcgtgatcaagctggcaggccacgagaagaaatcgcaccacggtccggcgcgcgtgttcgagcgtgaggaagaggccatggcggccgtgcaggaaggcaagattcgcgagaacgacgtggtagtgatccgctacgaaggtccgcgcggcggccccggcatgcgcgagatgctgggcgtcaccggagccattgtcggcgccggtctgagcgatagcgtagcgctcttgaccgatggccgcttcagcggcgccacgcacggtttcatgatcgcgcacgtggcacccgaggcctttaacggcggcccgatcgcggtcgttcaggaaggcgacatgatcacggtggacgcaacccgcggcgtgcttgaattggatattcccgccggggaactgaagagccggctggccgcatggaagccccgcgaaccccgttacaagaaaggcgtgatcgcgaagtactgcaagctggtttcaagcgcgagcgaaggcgcgatcactcaagcatga

SEQ ID NO: 132 - protein, 554 aa, Solibacter usitatus
MKLQSHTITQGRDRAPARAMLKAIGFTDEDLAKPIIGIANTWIETMPCNYNLRELAGKVKEGIRAAGGTPMEFNTIAISDGVTMGTEGMKASLISREVIADSIELMVRGHMFDGIVAMVACDKTIPGAAMALLRLNVPGVVLYGGTIMPGRFEGHDITIQDVFEAVGAHARGKITDAQLLDIEDHACPGAGACGGQFTANTMATVMELIGLSPMGTAAVPQVDKRKDAVAYRCGEVILNAVRKNILPRDICTRKAFENAIAGVAGTAGSTNAVLHLLAMAREAEVPLTIDEFEPVLARTPVFVDIKPGGKYMAADVDKAGGIPVIANRLLEGGYVDGSAITITGRTFAEEANEAKEVAGQPVILPLAKALKPRGGIAILRGSLAPEGCVIKLAGHEKKSHHGPARVFEREEEAMAAVQEGKIRENDVVVIRYEGPRGGPGMREMLGVTGAIVGAGLSDSVALLTDGRFSGATHGFMIAHVAPEAFNGGPIAVVQEGDMITVDATRGVLELDIPAGELKSRLAAWKPREPRYKKGVIAKYCKLVSSASEGAITQA

SEQ ID NO: 133 - DNA, 1680 bp, Roseiflexus sp.
atgtctagcgacctcaaacgccgcagtcgcaccattaccgatgggcgcacccgcgccggggcgcgcgccatgctcaaggcaatcggcttcaccgacgaagacctggcaaaaccgatcatcggcatcgccaatacctggatcgagacgatgccatgcaacatcaacctgcgcgcgctggcggcgcgggtcaaggaaggcgtgcgcgccgccggcggcacgccgatggagttcaacaccgtcgctatcgccgatggcgtcaccatgggtacggaagggatgaaggcgtcgctgatcagccgcgacctgattgccgactcgatcgaactgatggggcgcgggtatatgttcgacgcgatcatcgcgctggtggcatgcgacaaaacgatccccggagcagcgatgggattgacgcgcctgaacatccccggcttcctgctctacggcggatcgattgctcccggtcactggcgcggcaaagagatcaccatccagcatgtgtacgaagcgatcggtgcagttgccgccggtaagatgaccgacgaagaactgaaagagatcgaagatgccgcgtgccccggtccgggagcatgcggaggtcagtacactgccaacacgatggcaaccgtgatggaaattatcggtctctcgccgatggggacggctgcggtgccggctgccgacccgcgcaaagattcggttggataccgcgccgggcagttgattatggatgtgctgcgacgcgatctgaagccgcgcgatattctgacacgggcggcattcgagaatgcgatcgccagcgtggcgttgaccggcggctcgaccaacgcggtactccatctgctggcgctggcgcgtgaggcgggcgtgccgctaacgctcgacgatttcgacgcgatcagtcgtcgtacaccgctctgctgcgacctgatgccgagcgggaagtactctgccattcacgtcgatcaggcgggcggcattcaggtgattgcgagacgcctggtcgacggcggtttcgcgcacggcgatgcgatcaccgtcactggtcgcaccctggcggaagaggcggcggatgctgtcgaaacgccaggtcaggatgtgatccgtcccctcgataatccgatcaagccgacaggcgggttgctggtgctgcgcggcaatctggcgcccgaaggatcggtggtcaaactgttcggttatgagcgcacctaccaccgcggtccggcgcgcgtcttcgatggcgaagaggcggcaatggccgctatcgtcggcggtgaaattcgaccggacgatattgtgattattcgctatgaaggtccgcgcggcggtcctggcatgcgcgagatgctcggcgttacttccgcgattgtcggcgccggacttgggcagtcggtctcgctcattactgatggacgcttcagcggcgcgacgcgcggtgtgatgatcggacacgtggcgccggaggcggcgcgaggcggaccgcttgcgattgtgcaggagggggatgagatcgagatcaatctcgacgagcgccgtgttgatctgctgctgtcagaagaagagattgccgaccggttgctcgcctggcagccgccagcgccgcgttatgagtggggcgtgatggcgcgctacggtgcgctggtgtcgtcagcgtccgaaggcgccgtgctggtgacaccatga

SEQ ID NO: 134 - protein, 559 aa, Roseiflexus sp.
MSSDLKRRSRTITDGRTRAGARAMLKAIGFTDEDLAKPIIGIANTWIETMPCNINLRALAARVKEGVRAAGGTPMEFNTVAIADGVTMGTEGMKASLISRDLIADSIELMGRGYMFDAIIALVACDKTIPGAAMGLTRLNIPGFLLYGGSIAPGHWRGKEITIQHVYEAIGAVAAGKMTDEELKEIEDAACPGPGACGGQYTANTMATVMEIIGLSPMGTAAVPAADPRKDSVGYRAGQLIMDVLRRDLKPRDILTRAAFENAIASVALTGGSTNAVLHLLALAREAGVPLTLDDFDAISRRTPLCCDLMPSGKYSAIHVDQAGGIQVIARRLVDGGFAHGDAITVTGRTLAEEAADAVETPGQDVIRPLDNPIKPTGGLLVLRGNLAPEGSVVKLFGYERTYHRGPARVFDGEEAAMAAIVGGEIRPDDIVIIRYEGPRGGPGMREMLGVTSAIVGAGLGQSVSLITDGRFSGATRGVMIGHVAPEAARGGPLAIVQEGDEIEINLDERRVDLLLSEEEIADRLLAWQPPAPRYEWGVMARYGALVSSASEGAVLVTP

SEQ ID NO: 135 - DNA, 1701 bp, Rubrobacter xylanophilus
atgcagaccacggacctcaggcgcaagagccgcatcatgttcgaggggcgggaccgggcccccgcccgctcctaccttctgggcatgggctacactcgggaggacctcgagaagcccatcgtgggggtggcccactcctggatcgagaccatgccctgcaactacaaccaccgccggctggccgagaaggtcaaggagggcatccgggcggccgggggcacccccatggagctgaacaccatcgcgatctccgacgggatcacgatgggcacccaggggatgaagacctccctggtctcgcgcgaggtgatcgccgactccatcgagctggtggggcgcggccacatgttcgacgccatggtgatcctggtcggctgcgacaagaccatccccgccggggcgatggcgctggcccggctggacgtccccggcatggtcatctactccggctccatagccccggggcgcttcaggggccgcgacgtgaccatccaggacgtcttcgagggggtgggcgcccacgccgcgggcaagatgagcgacgaggagctgcgggagctggaggagggggcctgcccgggcgcgggggcctgcggcggccagtacaccgccaacaccatggccatagcgctgcagtttttgggcctctcgccggtgggctccgccgacccgcccgccctggacggccgcaaggaggcggtctgcgaggaggcgggccggctggtgatgcgcctgctggagcgggacctcaagccctcggacatcctgagccgcgcggccttcgagaacgccatcgcctccgtggccgctaccgggggctccaccaacgcggtgctccacttcctcgccctcgcccaggaggcgggcatcccgctggacatagaggacttcgaccgggtcagctcccgcacccccatcatcgcggacctgaagcccggcggccgctttacggccgtggacatggaccgcgcagggggctcccggctgctgggcgcgcggatgctggaggcgaacctcgtggacggctcccagcccaccgtcaccgggcgcaccctggccgaggagttcgagggcgcgcgggagcgcccggggcaggaggtgatcctctccgccgagaggtccctcagcgagagcggcggcctggtgatcctcaagggcaacctggcccccgagggctgcgtggtgaaggtcgcgggctacacccgccgccgccacgagggtccggcgcgcgtcttcgactccgaggagcaggcgatggaggcggtccaggccggccggatctcggcgggcgacgtggtggtgatccgctacgaggggccgcgcggcggccccgggatgcgcgagatgctgggggtgaccgccgcgctggtgggccaggggctcggcgagagcgtggcgctgctaaccgacgggcgcttctcaggggccacccgcgggctcatggtgggccacgtcgccccggaggcggcccgcggcggccccatagccgccctgcgcgacggggaccgcatcacgatcgacgtcaccggcaggacgctgagcgtggcgctcaccggcgaggagctgcggaggcgcctggagaactggcgggagcccgagccgcgcttcaggctcggggtgatggccaagtacgccgccctcgtctcctcggcctccgagggggcggtgaccgtcccggactggcagcgccgcgccacctga

SEQ ID NO: 136 - protein, 566 aa, Rubrobacter xylanophilus
MQTTDLRRKSRIMFEGRDRAPARSYLLGMGYTREDLEKPIVGVAHSWIETMPCNYNHRRLAEKVKEGIRAAGGTPMELNTIAISDGITMGTQGMKTSLVSREVIADSIELVGRGHMFDAMVILVGCDKTIPAGAMALARLDVPGMVIYSGSIAPGRFRGRDVTIQDVFEGVGAHAAGKMSDEELRELEEGACPGAGACGGQYTANTMAIALQFLGLSPVGSADPPALDGRKEAVCEEAGRLVMRLLERDLKPSDILSRAAFENAIASVAATGGSTNAVLHFLALAQEAGIPLDIEDFDRVSSRTPIIADLKPGGRFTAVDMDRAGGSRLLGARMLEANLVDGSQPTVTGRTLAEEFEGARERPGQEVILSAERSLSESGGLVILKGNLAPEGCVVKVAGYTRRRHEGPARVFDSEEQAMEAVQAGRISAGDVVVIRYEGPRGGPGMREMLGVTAALVGQGLGESVALLTDGRFSGATRGLMVGHVAPEAARGGPIAALRDGDRITIDVTGRTLSVALTGEELRRRLENWREPEPRFRLGVMAKYAALVSSASEGAVTVPDWQRRAT

SEQ ID NO: 137 - DNA, 1779 bp, Salinispora tropica
gtgacgacccggcctaacccactcttcgtcggcatcgagcgcgccccagcgcgcgcctccatgcgcgccacaggtctgtcgaccgaggacctgaagaagccgatgatcggggtagcgcacagttggatcggcacgatgccgtgcaacctcaaccaccggcggctcgcccaggaggtgatggccggcgtgcgcgccgcaggtggcaccccgatcgagatcaacaccatcgcgatctcggacgtgatcaccatgggcacggagggaatgcggacctcactggtgagccgcgaggtgatcgccgactccatcgagttggtatgccgcggccacggtctcgacggcctggtgaccctggccggctgtgacaagaccatacccggtgcggcgctggcccacgtgcgactcgacatccccggagccgtcatctattccggcacgatgatgccgggcgagcacctcgggcgcgacatcaccctgcaggatgtgtttgaggccgtcggcagcgccaccgccaccggctgcaccgacgagctcgacaagctcgagcgcgcggcctgtcccggtatcggggcctgcgcgggccactacacggccaatacgatggccgtggtgctggagttcctcgggctttccccgttcggctcgatggatccgccggcagtcgacgcccgcaaggacacggtctgccgccaggccggcgagctggtcatgcgggcggtggcagaagggctgcggcccagccggttcctgacgccctcctcgttgcgcaacgccatcgccgccggggtcgccaccggcggctcgacgaacatggtgctccacctgttggcgatcgctcgggaggcgggcatcccgctggacattgacgagttcgaccggatcagctcggtgaccccgatcatcgctgacctgcgtccaaacgggacgtacaccgcggtggacctcgaccgggcgggcggcacccgggtgatcgcccgccacatggtcgacgcgggcctgattgctggcgacgaaagcaccgtcaccggccgcaccgtcgcacacgaggccgcggacgcggccgagacacccggccaacgggtcgtcaccacggtggaggcacccctatcgccttccggtgctctcctgatcttgcggggtaacctagcgcccgatggcagtgtggtgaaggcacccggcgcggtgaccctgcggatgaccggcaccgcattggtgttcaactgcgaggaggaagcgatggccgcggtccagactggccgcgtccggccaggccacgtcgtcgtcatccgctacgagggtccgcgcgggggtccagggatgagggaaatgctcggagtgacctcggcgctcatcggccgcggcctgggcacgtcggtcggtctggtgaccgacggccgtttctcgggcgcgaccaggggactgatggtggggcacgtcgctccggaggcggcggagggcggaccgatcgcggcggtgtgcgacggtgaccggatcaccatcgacctgcagcggcgcgaatgctctgtcgacctggatccgggcgaactggccgcgcggatgcgagactggtcggctccgccaccgcgctacacgatcggcgtcatggccaaatactggtcgacggtctcgtcggcggccgtgggcgccgtgacgaccccgcaccccacccagggcccggcgacagcgtcaggtaaggccgaggagtgccagcaggcgagtgcggtcgagggcgtgatggcggttggcggcggcgatgtcggtgctgccggcggttcgtag

SEQ ID NO: 138 - protein, 592 aa, Salinispora tropica
MTTRPNPLFVGIERAPARASMRATGLSTEDLKKPMIGVAHSWIGTMPCNLNHRRLAQEVMAGVRAAGGTPIEINTIAISDVITMGTEGMRTSLVSREVIADSIELVCRGHGLDGLVTLAGCDKTIPGAALAHVRLDIPGAVIYSGTMMPGEHLGRDITLQDVFEAVGSATATGCTDELDKLERAACPGIGACAGHYTANTMAVVLEFLGLSPFGSMDPPAVDARKDTVCRQAGELVMRAVAEGLRPSRFLTPSSLRNAIAAGVATGGSTNMVLHLLAIAREAGIPLDIDEFDRISSVTPIIADLRPNGTYTAVDLDRAGGTRVIARHMVDAGLIAGDESTVTGRTVAHEAADAAETPGQRVVTTVEAPLSPSGALLILRGNLAPDGSVVKAPGAVTLRMTGTALVFNCEEEAMAAVQTGRVRPGHVVVIRYEGPRGGPGMREMLGVTSALIGRGLGTSVGLVTDGRFSGATRGLMVGHVAPEAAEGGPIAAVCDGDRITIDLQRRECSVDLDPGELAARMRDWSAPPPRYTIGVMAKYWSTVSSAAVGAVTTPHPTQGPATASGKAEECQQASAVEGVMAVGGGDVGAAGGS

SEQ ID NO: 139 - DNA, 1722 bp, Acidobacteria bacterium
atgaccgaaaaatccccaaagccacacaagcgtagcgacgccattaccgaaggtcccaaccgcgccccagcccgcgccatgctgcgcgccgccgggttcaccccggaagaccttcgtaagcccatcatcggcatcgccaacacctggatcgaaatcggtccctgcaacctgcaccttcgtgagctcgccgagcacatcaagcagggcgttcgcgaagccggcggtacgccaatggagttcaacaccgtctccatttctgacggcatcaccatgggctcggaaggcatgaaggcgtcgctggtcagccgcgaggtcatcgccgactccatcgaactcgtcgcgcgcggcaatcttttcgacggcctgatcgccctatcgggatgcgataaaaccatccccgggaccatcatggcgctcgagcgcctcgacatcccgggtctcatgctctatggcggctccatcgcgcccggcaaattccatgctcagaaggtcacgattcaagacgtcttcgaggcagtcggtacgcatgcgcgcggcaaaatgagcgacgctgatctcgaagaactcgaacacaacgcctgtcccggcgccggcgcctgcggtggacaattcaccgctaacaccatgtccatgtgcggcgaattcctcggcatctcgccgatgggcgctaacagcgtcccggcgatgaccgtagagaagcagcaggtcgcacgacgctgcggacacctcgtcatggaactggtccgccgcgacatccgccccagccaaatcatcacgcgcaaggcgatcgaaaacgcaatcgccagcgtcgccgcctccggcgggtcgaccaacgccgttcttcacttgctcgccatcgcgcacgaaatggacgtcgaactgaacatcgaagacttcgacaagatcagttcgcgcacgccactgctctgcgaactcaagcccgctggccgcttcaccgccaccgatcttcatgatgccggcggtattccgctcgtcgcgcaacgcctgctcgaagcgaacctgctgcacgccgacgcactgactgtcaccggtaagaccatcgccgaagaagcgaagcaggcgaaagaaacgccgggccaggaagtggttcgtccgcttaccgatcccatcaaagctaccggcggcctcatgatcctgaaaggcaacctcgcatccgaaggctgcgtggtcaaactcgtcggacacaagaagctcttctttgaaggccccgctcgcgtcttcgagtcggaagaagaagcctttgcgggcgtggaagaccgcaccatccaggcgggcgaagtggtcgtggtccgatatgaaggcccgaagggcggccctggcatgcgcgaaatgcttggcgtgacggcggccatcgccggcaccgaactcgccgagaccgtcgcgctcatcaccgacggacgtttctccggcgctacccgcggcttgagcgtgggccacgttgcgcccgaagccgcgaatggcggcgcgatcgctgtggtacgcaatggcgacatcatcactctcgacgtggaacgccgcgaactgcgcgtccacctcaccgacgcagaactcgaagcgcgcctccgcaactggcgcgcgccggagccacgatacaagcgcggcgtcttcgccaagtatgcgagcaccgtttcgtcggcgtcgttcggggccgttaccggctccaccatcgaaaacaagaccttagccgggagtacgaagtag

SEQ ID NO: 140 - protein, 573 aa, Acidobacteria bacterium
MTEKSPKPHKRSDAITEGPNRAPARAMLRAAGFTPEDLRKPIIGIANTWIEIGPCNLHLRELAEHIKQGVREAGGTPMEFNTVSISDGITMGSEGMKASLVSREVIADSIELVARGNLFDGLIALSGCDKTIPGTIMALERLDIPGLMLYGGSIAPGKFHAQKVTIQDVFEAVGTHARGKMSDADLEELEHNACPGAGACGGQFTANTMSMCGEFLGISPMGANSVPAMTVEKQQVARRCGHLVMELVRRDIRPSQIITRKAIENAIASVAASGGSTNAVLHLLAIAHEMDVELNIEDFDKISSRTPLLCELKPAGRFTATDLHDAGGIPLVAQRLLEANLLHADALTVTGKTIAEEAKQAKETPGQEVVRPLTDPIKATGGLMILKGNLASEGCVVKLVGHKKLFFEGPARVFESEEEAFAGVEDRTIQAGEVVVVRYEGPKGGPGMREMLGVTAAIAGTELAETVALITDGRFSGATRGLSVGHVAPEAANGGAIAVVRNGDIITLDVERRELRVHLTDAELEARLRNWRAPEPRYKRGVFAKYASTVSSASFGAVTGSTIENKTLAGSTK

SEQ ID NO: 141 - DNA, 1668 bp, Thermus thermophilus
atgaggtcggaccagatcaagaagggactcaagcaggcccccgcccgcgccatgctccgggcggtgggggtgggggacgaggacttcggaaggcccttcgtgggggtggtgaacaccttcaccgacgggatgccctgcaacttccacctgcgggagctggcccagcacctcaaggccgggctcagggaggcggggcttttcccctttgagttcggggcccccgccatctccgacgggatcagcatgggcaccccgggcatgcgggcgagcctcgtaagccgcgaggtcatcgccgacagcgtggagctcatcgcccagggctacctctacgacggcatggtggggctttccgcctgcgacaagaccatcccgggcacggccatgggggtgatccgcagcggcgtccccggcatggtcctctacggggggacgatcgcccccggggagtggcaaggccggaagctcaccatcgtggaggtctttgaggcggtggggcaaagggccgcggggaagatcagcgaggaggagcttttggagattgaacgccgggccatccccggccccggggcctgtggggggcagtacaccgccaacaccatggccatggccctcgaggccctgggcctctcccccgtgggctacaacgccatccccgccgtccaccccgaaaaggagcgggccaccaaggaggcggggaaaatcctcgcctgggccatcgcccacgactggaagcccaaggacttcctcacccggaaaagcttcctcaacgccgtcgccgccgtggccgccacgggggggagcaccaacgccgtcctccacctcctcgccctggccaaggaggcgggggtggagctcagcctggacgactttgaccagatctcccgcaagaccccggtgatcgcggacctccgcccttggggcacctacaccgcctgggagctgtatgaagccggggggacggccctcgtcttcaagcggcttctggaggcggggctcctctttggggaggagaagaccctcacgggccgcaccctggcggaggaggtggagcgggcctaccgggaacaagaggggcagaaggtggtcttccccgtggagaaggccctcaagccccacggggggctcgtggtgctcaaggggaacctcgcccctcaaggcgccgtcctcaagctcgcggggacggaacgcacctcctttgagggcccggcccgggtctttgactccgaggaggcggccatggagaaggtcctgaagggggagatccggcccggggacgtggtggtcatccgctacgtgggccccaagggggcgccggggatgcccgagatgctctcggtgacgagcgccatcgtgggggagggcctggggccggaggtggccctcctcaccgacggccgcttctccgggggcacccgcggcctcatgatcggccacatcgcccccgaggccttcgtgggcgggcccatcgccctcctggaagagggggaccgcatccggattgacgtggaaggccgccgcctcgaggtcctcctccccgaggaggagctggaaaggcggagggcccgctggcggccccgaccccccgccttcacccacggcctcttcgcccgctacgccgccctggtgcgccaggcggacgagggggcggtgctggaagacccgctctag

SEQ ID NO: 142 - protein, 555 aa, Thermus thermophilus
MRSDQIKKGLKQAPARAMLRAVGVGDEDFGRPFVGVVNTFTDGMPCNFHLRELAQHLKAGLREAGLFPFEFGAPAISDGISMGTPGMRASLVSREVIADSVELIAQGYLYDGMVGLSACDKTIPGTAMGVIRSGVPGMVLYGGTIAPGEWQGRKLTIVEVFEAVGQRAAGKISEEELLEIERRAIPGPGACGGQYTANTMAMALEALGLSPVGYNAIPAVHPEKERATKEAGKILAWAIAHDWKPKDFLTRKSFLNAVAAVAATGGSTNAVLHLLALAKEAGVELSLDDFDQISRKTPVIADLRPWGTYTAWELYEAGGTALVFKRLLEAGLLFGEEKTLTGRTLAEEVERAYREQEGQKVVFPVEKALKPHGGLVVLKGNLAPQGAVLKLAGTERTSFEGPARVFDSEEAAMEKVLKGEIRPGDVVVIRYVGPKGAPGMPEMLSVTSAIVGEGLGPEVALLTDGRFSGGTRGLMIGHIAPEAFVGGPIALLEEGDRIRIDVEGRRLEVLLPEEELERRRARWRPRPPAFTHGLFARYAALVRQADEGAVLEDPL

SEQ ID NO: 143 - DNA, 1725 bp, Maricaulis maris
atgacccacgacagacgcaaatcttcagacgccatcacagccggcgcggcccgcgccccggcccgggccatgttgcgcgcgaccggcatgacggatggtgatttcgacaagccgatgatcggggtgatcaacacctggaccacggtcacgccctgcaacatgcacctggcggacctggccgcgccagtccgcgaagccgttcgtgaagccggtggccatccggtcgacttcaacacgatcgtcgtgtccgacgggatctcgatgggtaccgaaggcatgcgtgcctcgctgatctcgcgcgaggtgatcaccgactcgattgaactggcgacccggggtcacagcctggatggcgtcgttatcctcgtcggttgtgacaagaccattccggcggccgcgatggcgctggcccgcatggatgtgcccggttgcatcctctacggcggcacgatcatgccgggcaagctgggcgatcaggccctgtccatccaggacgtgttcgaagctgtaggcgcccatgccgcggggaccctggatgatgcaggcctggacaaggtcgaaaaagcggcttgcccgggcgccggcgcctgtggcggccagtttaccgccaatacgatggccatgatcctgaccatgctgggtctgtctccgatgggcgtgaacgacattcccgccccgcaccccgacaagccggaggcggcggctcgctgcggccgactggctgtcgagctggcgaaatccggcaccaccccgcgccgtttcatcaccgaagcctcccttcgcaatgccgttgtcggcgcttccgcctcgggcgggtcgaccaatgccgtcctgcacgtcgccgcaatcgccgccgaagccggcataccgttcgacattgccgagttcgaccgtatctccagcgaagcccccgtcatcaccgacctgaagccgggcgggcgttttctggcccaccacatgttcctggccggcggctcccgcctgttcggtcagcgcctgatcgagggcggcttgctggctgataccccgactgtctccggcaagagcctgcatgaagagtgcgccagcgccgaagagtcactcaatcaacgtgtcatccaatccgttgccaacccggtcaaaccggatggtggtttccgcgtcctgaccggcgacctggcccccgaaggcgcagtcctgaaactgtcgggtcatgcccgcagcgaattttccggaccggcccgggtgttcgaatgcgaggaagacgccttcgccgccgtggaggccaactcggtcaaggctggtgacatcatcatcatccgcaatgagggccccaagggcggccccggaatgcgggaaatgctgggcgtgaccgccgccctggtcggtcagggactggccggcgatgtcgccctgatcaccgatggccgcttttccggcgcctccaagggcttcgtgatcggtcatgtcagccccgaggccgccgatggcggtccgatcggacgggtccgaaatggagacagggtgcgcattgatgtcgccgcccgccggatcgatgtcgatgccgacctgtctgcccgtccgcaatcctcgtccggccggcccgccccgaccggtgttttcgccaaatatgccgcgctggtctcttcggcctcgcgcggcgccaccaccatcatcgcgccgactgccaccaaggcgtcgccgcaaacaaccgacatgcaatccaagcaggagatgcccgcatga

SEQ ID NO: 144 - protein, 574 aa, Maricaulis maris
MTHDRRKSSDAITAGAARAPARAMLRATGMTDGDFDKPMIGVINTWTTVTPCNMHLADLAAPVREAVREAGGHPVDFNTIVVSDGISMGTEGMRASLISREVITDSIELATRGHSLDGVVILVGCDKTIPAAAMALARMDVPGCILYGGTIMPGKLGDQALSIQDVFEAVGAHAAGTLDDAGLDKVEKAACPGAGACGGQFTANTMAMILTMLGLSPMGVNDIPAPHPDKPEAAARCGRLAVELAKSGTTPRRFITEASLRNAVVGASASGGSTNAVLHVAAIAAEAGIPFDIAEFDRISSEAPVITDLKPGGRFLAHHMFLAGGSRLFGQRLIEGGLLADTPTVSGKSLHEECASAEESLNQRVIQSVANPVKPDGGFRVLTGDLAPEGAVLKLSGHARSEFSGPARVFECEEDAFAAVEANSVKAGDIIIIRNEGPKGGPGMREMLGVTAALVGQGLAGDVALITDGRFSGASKGFVIGHVSPEAADGGPIGRVRNGDRVRIDVAARRIDVDADLSARPQSSSGRPAPTGVFAKYAALVSSASRGATTIIAPTATKASPQTTDMQSKQEMPA

SEQ ID NO: 145 - DNA, 1662 bp, Parvularcula bermudensis
atgacccaaaacaaacgaagcgacgccatcaccaagggaccggcccgggccgctgcccgcgccatgctccgcgcgacgggcatgtcggacgccgatttcgacaagccgatggtggggatcatcaacacctacgcctcggtcactccctgcaatatgcatttgcgcgccctgggcgaagacgtccgcgccggtgtcgttgaggggggcggctggccggtcgagttcgggaccatcgtcgtctccgacggcattacgatgggccacgaagggatgcgggccagcctgatgtcgagggaggtgatcgccgactccatcgaactagccgtgcgcggccacgcgctcgatgcggccatcgtgctggtgggatgcgacaagaccattccggccgcagcgatggccctggcacgactcgatatccccgggatcgttttctacggcggcacgatcgcccccggctgtcacaaaggccaggatatcagcattcaggatgccttcgaagctgtcggcgcctatggccttggccggatcgatggcgacgaattgtcggcggtggaacgcgcggcttgccctggtgccggggcgtgcggtggccagttcacggcgaacactatggcgatggccatggcgtttctcggccttgcccccatgggcgccggcgaccccccggccctccatccggacaaaacgatcgaggctcggcgctgtggccaattggtggccgagaatgcccttggcaccaccgcccgcacctatgtctcgcccgagagcctccacaatgccgtctgtgccgttgtcgcctccggcggctccaccaatgcggtgctgcacctcgccgctatcgccgcggaggcgaaggtccccttctcgatcgatctgttcgaccagctttcgaggaccacgccggtgatcgcgaacctcaaaccgggggggcgttacctggcgcaggatctgttcgccgtcgggggcaatcgccggttcggcaaaatgctgatggaagcgggcgcgctgaaagatattcccacgacgagcggacgctctctctttgccgagttggccgaggcgccgccgagcgatgacaccgacgtgctgcgccctgtggacgcgccgctcaagcccaccggcgggctgcgcatcctctatggcgacgtggcgcccgacggcgccgtgctgaaaaccgccggctatggcgacggcgcctttgaggggccggcgcggatcttcgaatgtgaggaggattgcttcgcggcggttcaggccggcaccattgccgagggcgatgtcgtcgtgatccgcaatgaaggccccaaaggcggcccggggatgcgagagatgctcggcgtcacagcggccctcgccggacagggccttgcaggaaaggtcgccttgttgaccgacggccgattttcaggcgccagtcatggcttcgttatcggtcacatctcccccgaggcggcggtgggcggccccatcggcctgttgcaggagggcgaccggatttcgatcgacgccgaagggcggcgtatcgatgccgccatcgactggcaggcccgcaaagagaattataccccaaccccaaaggcgccccagggcggctatttcgacaaatatcgcgcgttggtcggctcggcgagccgcggcgccacaactctccaggaaggataa

SEQ ID NO: 146 - protein, 553 aa, Parvularcula bermudensis
MTQNKRSDAITKGPARAAARAMLRATGMSDADFDKPMVGIINTYASVTPCNMHLRALGEDVRAGVVEGGGWPVEFGTIVVSDGITMGHEGMRASLMSREVIADSIELAVRGHALDAAIVLVGCDKTIPAAAMALARLDIPGIVFYGGTIAPGCHKGQDISIQDAFEAVGAYGLGRIDGDELSAVERAACPGAGACGGQFTANTMAMAMAFLGLAPMGAGDPPALHPDKTIEARRCGQLVAENALGTTARTYVSPESLHNAVCAVVASGGSTNAVLHLAAIAAEAKVPFSIDLFDQLSRTTPVIANLKPGGRYLAQDLFAVGGNRRFGKMLMEAGALKDIPTTSGRSLFAELAEAPPSDDTDVLRPVDAPLKPTGGLRILYGDVAPDGAVLKTAGYGDGAFEGPARIFECEEDCFAAVQAGTIAEGDVVVIRNEGPKGGPGMREMLGVTAALAGQGLAGKVALLTDGRFSGASHGFVIGHISPEAAVGGPIGLLQEGDRISIDAEGRRIDAAIDWQARKENYTPTPKAPQGGYFDKYRALVGSASRGATTLQEG

SEQ ID NO: 147 - DNA, 1683 bp, Oceanicaulis alexandrii
atgaccgataacaaacgcccctcgcacacactgatccaggggccggcccgcgccccggctcgcgccatgcttcgcgcggccggctatgacgatgaccggatggcgaaacccatgatcgccatcgtcaacacctggaccagcgtcaccccgtgcaacatgcaccttcagggtctcgccgatcatgcccgcgccgggatcgaggcggcaggcggcacggcggtggatttcaacaccatcgtcgtcaccgacggcatctccatgggcaccgaaggcatgcgcgccagcctgatgagccgcgattgcgtggcggactccgccgaactcgccgtgcgcggccattgcctggacgccgtgctgttcctggtgggctgcgacaagaccctgcctggcgccgccatggcggcggcgcggctgaacctgcccagcgtcgtgctctatggcggctcgatcatgccgggcaagctgggcgacaaggcggtgacgattcaggacgtgttcgaggccgtcggggcctgcgcggcgggcaagatcagcgaagacgaactcgtcgaagtcgaaaaagccgcctgccccggcgcgggcgcctgcggcggccagttcaccgccaacaccatggcgctggcgctgaccgcgctcggcctgtcgcccatggggctcaacgacattcccgccgttcatcccgacaagcccgaagccgcgcgcaaggccggtcaggccgtggtcgatgcgctgaaggcggatcgcaagccgcgcgacatcatcaccccgacctctctgaaaaacgccgccgtcgcggtgaccgccacggcgggctccacaaacgcggtcctgcatcttctggccattgcccgcgaagccggggtcagccgggatcagttcgacattgatgtgtttgacgccgtgagccggaagactccggtgatcgccgatctcaagcccggcggtcgctatatggcgccggacatggcggctgcgggcggggcacgcctgctgctgcagcgcctgaaagccgcggacatgctggacgatgcgcccaccgtcaccggcaagaccctgtttgaagaagccgagctggccgctgaaacgccgggtcaggacgtgatcctgtcgcccgacaaaccgctcaagaagcgcggcggcttcggcgtgctttatggcgatctcgccccggaaggctgcgtcgccaagctcgcgggtcatgaccgtctgttctttgaaggccccgccaaggtatttgattgcgaggaagactgcttcgccgcggtcaattcgggcgggatcgagaagggcaatgtggtcgtcatccgcaatgaaggccccgccggcgggccgggcatgcgtgaaatgctggccgtcaccgccgccattcaaggcgcaggcctgggcgatgatgtggcgttgatgacggacggccgcttctcgggcgcgacctatggcttcatggtcgggcacgtcgcccccgaagccgcccatggcggacccatcgcctttgtgaagaccggcgatatcatcaccatcgatatcgagaaccgtcgcattgatgtgaaggccgatctcaaggcgcgcatggcccagggcttcaccccgcccgaacccaaataccgcacgggggcgttcgcgaaatacgccaggctcgtccactccgcatcagatggcgcggtgacgagcttcccgttcgactag

SEQ ID NO: 148 - protein, 560 aa, Oceanicaulis alexandrii
MTDNKRPSHTLIQGPARAPARAMLRAAGYDDDRMAKPMIAIVNTWTSVTPCNMHLQGLADHARAGIEAAGGTAVDFNTIVVTDGISMGTEGMRASLMSRDCVADSAELAVRGHCLDAVLFLVGCDKTLPGAAMAAARLNLPSVVLYGGSIMPGKLGDKAVTIQDVFEAVGACAAGKISEDELVEVEKAACPGAGACGGQFTANTMALALTALGLSPMGLNDIPAVHPDKPEAARKAGQAVVDALKADRKPRDIITPTSLKNAAVAVTATAGSTNAVLHLLAIAREAGVSRDQFDIDVFDAVSRKTPVIADLKPGGRYMAPDMAAAGGARLLLQRLKAADMLDDAPTVTGKTLFEEAELAAETPGQDVILSPDKPLKKRGGFGVLYGDLAPEGCVAKLAGHDRLFFEGPAKVFDCEEDCFAAVNSGGIEKGNVVVIRNEGPAGGPGMREMLAVTAAIQGAGLGDDVALMTDGRFSGATYGFMVGHVAPEAAHGGPIAFVKTGDIITIDIENRRIDVKADLKARMAQGFTPPEPKYRTGAFAKYARLVHSASDGAVTSFPFD

SEQ ID NO: 149 - DNA, 1605 bp, Plesiocystis pacifica
atgctgcgcgccacgggcctcgaagacgaggacctcgccaagccgctgatcgccgtggtcaacacctggagcgacgtgaccccctgcaacgtgcacctgcgcgggctcggggaggcggtccgccgcggggtccaagacgctggcggaacgcccttcgagttcaacaccatcgtcgtcagcgacggcatctccatgggcacggagggcatgcgggcgtcgctggtctcgcgggaggtcatcgccgacagcatcgagctcgccgtgcgcgggcacagcctggacgcggtcgtggtcatcgtgggctgcgacaagacgatcccggcggcggccatggccctcgcgcgcctcgatcgtccggggctggtcctctatggcggctcgatcgccaagggccggcaccggggggccgacgtcagcattcaggaggtcttcgaggccgtgggcgcctgcgcggccgggcgcatcgacgcggacgagctcgacgccatcgagcgcagcgcgtgcccgggcgcgggggcctgcgggggccagttcacggccaacaccatggcccaggtgctgaccttgctcgggctctcgcccctgggcgcgaacgacattccggccacgcacccggccaagctcgaggtcgccgaggcttgcgggcgtcaggtcctcgagctgctcgagcgcgagctccggccgagcagcttgctgaaccgggcggccttcgcccgggcgacggcgggggtggccgcgagcaagggctcgaccaacgccgtgctccacatcctcgccatcgcccgggaggccggctgcgacttctcgttgcgcgagctcgacgaggtctgcgcggcgacccccgtgctctgcgacctcaagccctcggggcgctacctggccgtcgacatgagcgaggccggcgggacggccctgctcgcccggcggctgttcgaggccgggctgtgcgaggacggggcgagcgtcgacgggccctcgctccgggccctggtcgccgacgcccccgagcgcgaggggcagcgggtgatccggccggcgagccaggccttcgcgccccggggcgggctcatggcgctgttcggcaacctggcgcccgagggctgcgtgctcaagctgccccccgagctccccgaggtgttcgagggggtcgccagggtgttcgacgacgaggactcggccttcgccgcggtgcaggccggcgccgtcgaggccggcgacgtcgtcgcgatccgctacgaggggccggccggcggcccgggcatgcgcgagatgttggcggtcacggctgccctcgtgggtcggggcctcggcgggcgcgtggcgttgatcaccgacgggcgcttttcgggggcgagccacgggctggtcatcggccacgtcgcccccgaggccgcccggggcggccccctggccaggctccgcgacggcgaccgcgtgcgcatcgacgtcgtcggccagcgcctcgacgtgctcgacgcggacttcgaggcccggcgaagcccggccgcgaaggcgcctcgctacctcaccggcgccctcgccaagttcgccgcgctggtcgactcggccagcgaaggcgccacgacttctcgtccgcagttttga

SEQ ID NO: 150 - protein, 534 aa, Plesiocystis pacifica
MLRATGLEDEDLAKPLIAVVNTWSDVTPCNVHLRGLGEAVRRGVQDAGGTPFEFNTIVVSDGISMGTEGMRASLVSREVIADSIELAVRGHSLDAVVVIVGCDKTIPAAAMALARLDRPGLVLYGGSIAKGRHRGADVSIQEVFEAVGACAAGRIDADELDAIERSACPGAGACGGQFTANTMAQVLTLLGLSPLGANDIPATHPAKLEVAEACGRQVLELLERELRPSSLLNRAAFARATAGVAASKGSTNAVLHILAIAREAGCDFSLRELDEVCAATPVLCDLKPSGRYLAVDMSEAGGTALLARRLFEAGLCEDGASVDGPSLRALVADAPEREGQRVIRPASQAFAPRGGLMALFGNLAPEGCVLKLPPELPEVFEGVARVFDDEDSAFAAVQAGAVEAGDVVAIRYEGPAGGPGMREMLAVTAALVGRGLGGRVALITDGRFSGASHGLVIGHVAPEAARGGPLARLRDGDRVRIDVVGQRLDVLDADFEARRSPAAKAPRYLTGALAKFAALVDSASEGATTSRPQF

SEQ ID NO: 151 - DNA, 1713 bp, Bacillus sp.
ttgggaagagatcttagaataaaaagccatgtaatcagcgaggatgaaaggcgcgcaccaaaccgggcgatgctgcgggcagtagggttcacggatgaagatttcaaaaagccgatgatcggcattgcaagcacatggagcgaagtgactccgtgcaatatacatatcaatgaacttgcattcaaggcgaaggacggtgccagggaagccgggggagctccgcttgtattcaatacgattactgtttctgacggaatctccatgggaacagaggggatgaggtattcccttccgagccgcgacctgattgctgattccattgaaacggtcgttgggggtgaaagcctggacggctttgttgccattggaggctgcgataaaaatatgcccggctgcctgatggccatcgcaaggatgaacctgcctgctgtttttgtgtatgggggcacaatcaagcctggcaagctgcagggacaggatatcgatattgtgtcagtatttgaaggggtaggacagttcaatggtggggccattgataaagctggactcaatgagatcgaatgccatgcatgtccgggggccggctcctgcggcggaatgtacacagccaatacgatggcaagcgctatcgaggcgctgggaatgagccttccgggcagttcctccaatccggcagaaacagatgaaaagcggcaggattgccatgaagcaggaaaggcagtctaccgccttttggagcaggatatcaggccaagggatattcttacgaaggaagcgtttgagaatgcaattactgtcgtgatggctttgggcggttcgacaaatgccatcctccatttgatggccatcgcccattctgctgaagtggatctgtcacttgaggacttcaaccgccttcagaaaacggtcccccatatagccgatttaaagccgagcggaaaatatgtcatgcagaatctccatgaagcaggaggagtcagtgcagttatgaaaatgctgctgagggaagggctgcttcacggcgattgtctgactgtgacgggcaagacgctcgctgaaaatctggaagaagcagaagatctgaaagctggccaaaaggtcatttacccgcttaatgcccctcttcgggaaaacgggccgcttgtagtcctgaaaggcaatcttgccccggaaggcgccgtagcgaaggtatccggcctgaaggtcaccaggcacaccgggcctgccaaggtgtttgatgatgaggagtctgctacagatgctgtcctgaagggtgacattcaggctggtgatgtactggttatcaggtacgaagggccaaaaggcgggcctggcatgccggaaatgctttctatttcgggcatcctcgtaggaaaaggtcttggcgaaagtgtggccctgctgacagacgggcgtttctcgggaggtacccatggccttgtggtaggacatatcgctccggaagcacaggtcggcggaccgattgccctaatacagacaggtgacaggattactattgacagcaccgaacagacacttgaagtggatgtctctcctgctgaactggaagagaggaagaaatcctgggatccgccgccgcttttaacccgcggagccctggctaagtatacaaggctcgtttcctccgcttcaaggggggctgtcactgaccattttgaggaagagcctgctgccaggccgcttaaagtgtag

SEQ ID NO: 152 - protein, 570 aa, Bacillus sp.
MGRDLRIKSHVISEDERRAPNRAMLRAVGFTDEDFKKPMIGIASTWSEVTPCNIHINELAFKAKDGAREAGGAPLVFNTITVSDGISMGTEGMRYSLPSRDLIADSIETVVGGESLDGFVAIGGCDKNMPGCLMAIARMNLPAVFVYGGTIKPGKLQGQDIDIVSVFEGVGQFNGGAIDKAGLNEIECHACPGAGSCGGMYTANTMASAIEALGMSLPGSSSNPAETDEKRQDCHEAGKAVYRLLEQDIRPRDILTKEAFENAITVVMALGGSTNAILHLMAIAHSAEVDLSLEDFNRLQKTVPHIADLKPSGKYVMQNLHEAGGVSAVMKMLLREGLLHGDCLTVTGKTLAENLEEAEDLKAGQKVIYPLNAPLRENGPLVVLKGNLAPEGAVAKVSGLKVTRHTGPAKVFDDEESATDAVLKGDIQAGDVLVIRYEGPKGGPGMPEMLSISGILVGKGLGESVALLTDGRFSGGTHGLVVGHIAPEAQVGGPIALIQTGDRITIDSTEQTLEVDVSPAELEERKKSWDPPPLLTRGALAKYTRLVSSASRGAVTDHFEEEPAARPLKV

SEQ ID NO: 153 - DNA, 1686 bp, Oceanobacillus iheyensis
atgggaaaagatttgcggataaaaagtaaagcatttgacggtactatgcgagctccaaatagggcaatgcttcgtgcggtcggtctgacagatgaagattttaagaagcctatgattggtgtagcaagtacatgggcagaagtaacaccatgtaatatacatttaaatgatttagctcttcttgccaaaaaaggggtccggcactcggatgctgttcctttggtctttaatacgataaccgtatctgatggaatttccatgggaacacaaggtatgaactactcattgccgagtcgagatcttattgctgattcaatcgaaaccgttgttggagcagaaaatttagatggattagtagcaattggagcctgtgacaagaatattccagggtgcttgattgcgattgctaatgcaggagttccctcggtatttgtatatggcggaacaattgccccaggaaatgtggatgggaaagatatagatattgtttcagttttcgaaggagtaggacaacataatgcaggagctattgacgataatcaattaagaaaagtagaatgtaatgcttgtccaggtgcaggagcatgtggtggaatgtataccgccaatacaatggcctctgcagcggaagctttaggaatcagtttaccgggaagctcttctaacccagctgaatcagaagaaaagcagggtgatgtggaggcagctggtgaagcgattaaagatttattagagaaaggtatttatccaaaagatattctaacgaaaaaagcttttgaaaatgcaattacagtagttatggcattgggaggatctacaaatgcgatcttgcatttactagcagtttctcatgccgcagaagtagacttaacgattgatgattttaatcgaatccagaaaaaagtaccgcatttagccgatttaaaaccaagtggacgttttgtaatgcaagaccttcatcgagttggtggggtacaagcagtaatgaaattattgcatgaaaatggatacttacatggcgactgtcttactgtaacaggaaagactatagcagaaaatctagctgaagctcctgctttgaaagaaaatcaacaagtcattatgccgtttgataatccaaaaagggaagatggtcctctgattgtcttaaaggggaatttatcaccaactggtgctgtggcaaaagtatcaggggtgaaagtgaaacgacacacaggtcctgcacgtgtattcaacacagaaaaagaggcaactcaagcaattctggataacaaaattaaagagggagatgtattagttattcgttatgttggaccaaaaggtggtcccggaatgccggagatgttgtctgtttctagtattcttgtaggtaaaggaatgggagaatcggtagctttattgacggatggtagattctctggtggtacacatggtcttgtggtaggtcatataagtccagaggcacaagatggcggaccaattgcatttctgcaagaaggagatatggtgaccatagattctaataaaagagaaatttccatggacgtttcggaagatgaaataaaactacgtcaaggaaaatgggaagcccctgaactacataagaaaggggttcttggaaaatatgcacataatgttacttgctcatccaaaggtgcagtaacagattatttgaaccgagaataa

SEQ ID NO: 154 - protein, 561 aa, Oceanobacillus iheyensis
MGKDLRIKSKAFDGTMRAPNRAMLRAVGLTDEDFKKPMIGVASTWAEVTPCNIHLNDLALLAKKGVRHSDAVPLVFNTITVSDGISMGTQGMNYSLPSRDLIADSIETVVGAENLDGLVAIGACDKNIPGCLIAIANAGVPSVFVYGGTIAPGNVDGKDIDIVSVFEGVGQHNAGAIDDNQLRKVECNACPGAGACGGMYTANTMASAAEALGISLPGSSSNPAESEEKQGDVEAAGEAIKDLLEKGIYPKDILTKKAFENAITVVMALGGSTNAILHLLAVSHAAEVDLTIDDFNRIQKKVPHLADLKPSGRFVMQDLHRVGGVQAVMKLLHENGYLHGDCLTVTGKTIAENLAEAPALKENQQVIMPFDNPKREDGPLIVLKGNLSPTGAVAKVSGVKVKRHTGPARVFNTEKEATQAILDNKIKEGDVLVIRYVGPKGGPGMPEMLSVSSILVGKGMGESVALLTDGRFSGGTHGLVVGHISPEAQDGGPIAFLQEGDMVTIDSNKREISMDVSEDEIKLRQGKWEAPELHKKGVLGKYAHNVTCSSKGAVTDYLNRE

SEQ ID NO: 155 - DNA, 1695 bp, Staphylococcus saprophyticus
ttgactaaagaacacagcgaacaacaaaaagatttacgtattcgcagcaaagtaattagtgaaggtgtcagtcgtacacccaatcgagcttatttacgggcactcggctttgaagatgaagattttcaaaaaccaatgattggtgttgcaagtacttggagtgaagtcacgccatgtaatatgcatattgatggtttagctcgtgcttcaaaacaaggcattagtgaggcaggtgcttcgccacttattttcaataccattacagtatcagatggtatttcaatgggaacagacggtatgcgcttctctttaccaagtcgtgaaattatcgcggattctatagaatcagttgtcagtgctgaaaatttagatgcacttgtcgctattggtggttgtgacaaaaacatgccgggatgtatgattggtatcgctcgtcttaatttaccagctgtctttgtttatggcggcacaatattgcctgggaaattggatggtaaagatttagatgctgtttctgcctttgaaggcgtcggacagtataataatggcgaaatagataaagaggcacttcacaaagtagaatgtgccgcttgtccaggggccggtgcttgtggtggtatgttcactgccaatacgatgtcatctgctattgaggccatgggcatgagtttaccaggaagtgcttcgcatccagcagtttctacaaataaatccaaagacagcagagcagcaggtaaagccgtttataaactattagaaaaaggcatctatccaaaagatattatgactaaagaagcatttgaaaatgcaattactgtagtcatggcacttggaggatctaccaatgcaattttacatttacttgctattgcacatacaatcgaagtcgatttaacacttgatgatttcgaaaaaattcgtaagcgtgtcccacatatcgctgacttgagaccaagtggtaaatatgtcatggcacatcttgatgaagtcggtggtattccagcagttatgaaattattacatgacaaaggcttaatccatggagattgcttgaccgtaactggcaagactgttgctgaaaaccttgaacaacaacctgacctaaccgataataaatctatcattgattttgacaatccaaaacatgctactggaccgcttgttatcttgaaaggaaatcttgccccagaaggcgccgttgcaaaaatctcaggtctgagcgtaacttatatcaaaggacccgcacgcgtatttgattccgaatctaaggctaccaaagccatcttaaatgacgaaatcaaaccaggtgacgtggtcgttattcgatatgctggccctaaaggtgcacctggcatgcctgaaatgctatctgcatcatccattcttgtgggtaagggattaggtgaatctgtagcgttactcacagatggccgtttctctggcggttctcatggtcttgttatcggacacgcagcgccagaatcacaagttggcggtccgatggcattattagaagaaaacgacacgattaccattgacgcagaaaaacttgaaattagttttgatgtatcagacgaagaacttgagcgtcgtaacaaacaatggcaagcaccacctttaaaagccaatcgaggtacgctagctaagtatgctaagcttgtgtcatccgcttcaaaaggagctatcacagactaa

SEQ ID NO: 156 - protein, 564 aa, Staphylococcus saprophyticus
MTKEHSEQQKDLRIRSKVISEGVSRTPNRAYLRALGFEDEDFQKPMIGVASTWSEVTPCNMHIDGLARASKQGISEAGASPLIFNTITVSDGISMGTDGMRFSLPSREIIADSIESVVSAENLDALVAIGGCDKNMPGCMIGIARLNLPAVFVYGGTILPGKLDGKDLDAVSAFEGVGQYNNGEIDKEALHKVECAACPGAGACGGMFTANTMSSAIEAMGMSLPGSASHPAVSTNKSKDSRAAGKAVYKLLEKGIYPKDIMTKEAFENAITVVMALGGSTNAILHLLAIAHTIEVDLTLDDFEKIRKRVPHIADLRPSGKYVMAHLDEVGGIPAVMKLLHDKGLIHGDCLTVTGKTVAENLEQQPDLTDNKSIIDFDNPKHATGPLVILKGNLAPEGAVAKISGLSVTYIKGPARVFDSESKATKAILNDEIKPGDVVVIRYAGPKGAPGMPEMLSASSILVGKGLGESVALLTDGRFSGGSHGLVIGHAAPESQVGGPMALLEENDTITIDAEKLEISFDVSDEELERRNKQWQAPPLKANRGTLAKYAKLVSSASKGAITD

SEQ ID NO: 157 - DNA, 1752 bp, Bacillus selenitireducens
atgatagacgttatatggcatgtgagattatgtacattgacagaaagggtgaatgttgtgagtgagaaggatttgcgtcataaaagtaaagtgatcagtgaaggggtaaaccgggttccgaaccggtcaatgctgcgtgcagtcgggtttaccgatgaggatttcaagaaaccgatgattggggttgcgagtacgtggagtgaggtcaccccttgtaatgtacatattgatgccttggcaagagatgccaagctcggagcggcagaaggcggcggagcgccgatgatcttcaatacgatcatggtcgctgacgggattgcgatggggcatgaaggcatgagctattccctgccgtcaagggaagtcatcgccgattccattgaaacggttgtcggagcagaagccctcgacgccgtcgtcgccattggcggttgtgacaaaacaacgccgggctgtctcatttccatgggacggatgaatgtaccgggcgtctatgtgtatggcggtacgatcaaaccggggaaactcgatggcaaggacatcgacatcgtcaactccttcgaggcagtcggtcagtaccagagcggcaagcttgatgaggaaggccttcataaagtggaatgttctgcctgccctggaccgggttcctgcggcgggatgtacacggcaaatacaatggccgcagcggcagaagcgctcggcatgagtattccaggctcatcatcgacgcctgcagtggatgattataagcatcaggagtgcaggcaggccggcgatctgacggttcagcttttggaaaaagacatcaagccccgtgatattatgacgaagaaggcgtttgagaatgccattaccgtcgtcatggccctcggcggctcaacaaatgccttcctgcatcttcttgcgattgcgagaagcgttgacgtcgacttgacgtatgatgactttgaacgggtccgcaagaacgtcccgcatattgccgatctgaagccaagcggtcagtatgtcatggaagacctcttccaggcagggggcgtgcctggcgtgatgaagctgcttcttgaagccggcctcctacatggcgactgcatgacggtaactggcaagacgattgccgagaaccttgcagctgcggaaccgctgaaagaaggacaaaaagtgatttttccgcttgataagccgattaagccaagcggtccattgattgtcatgaaagggaatctggcccctgaaggcggggttgccaagatgagcggtcagtcgatcagtcattttgaaggtacgatcaaagtgtatgacagtgaggccgatgcgacgaaggccattgaagcgggagagatcgttgagggggatgtcctcgtcatccgctatgtgggtccaaaaggcggtccgggtatgccggagatgctctcgatcacggcgatgatcgtaggtcgaggcttgaacggtaaagtcgcactgatgacagatggccgattctccggcggttcacacggctttgttatcggtcatattgcaccggaagccgcagtaggcgggccgattgcgctgatcaagaatggtgacaaggtcacgatcgatgcggatacgcaggagatcaatctgcatattgatgaagcggagtttgagaagcggaaacaggaatggcagccgaagccgccgcggtttacgtacggcgtgttgaagaaatatgccaaactcgtttcgtcttcagcggaaggcgcaattacagacggtaaagaagccgattga

SEQ ID NO: 158 - protein, 583 aa, Bacillus selenitireducens
MIDVIWHVRLCTLTERVNVVSEKDLRHKSKVISEGVNRVPNRSMLRAVGFTDEDFKKPMIGVASTWSEVTPCNVHIDALARDAKLGAAEGGGAPMIFNTIMVADGIAMGHEGMSYSLPSREVIADSIETVVGAEALDAVVAIGGCDKTTPGCLISMGRMNVPGVYVYGGTIKPGKLDGKDIDIVNSFEAVGQYQSGKLDEEGLHKVECSACPGPGSCGGMYTANTMAAAAEALGMSIPGSSSTPAVDDYKHQECRQAGDLTVQLLEKDIKPRDIMTKKAFENAITVVMALGGSTNAFLHLLAIARSVDVDLTYDDFERVRKNVPHIADLKPSGQYVMEDLFQAGGVPGVMKLLLEAGLLHGDCMTVTGKTIAENLAAAEPLKEGQKVIFPLDKPIKPSGPLIVMKGNLAPEGGVAKMSGQSISHFEGTIKVYDSEADATKAIEAGEIVEGDVLVIRYVGPKGGPGMPEMLSITAMIVGRGLNGKVALMTDGRFSGGSHGFVIGHIAPEAAVGGPIALIKNGDKVTIDADTQEINLHIDEAEFEKRKQEWQPKPPRFTYGVLKKYAKLVSSSAEGAITDGKEAD

SEQ ID NO: 159 - DNA, 1704 bp, Streptococcus pneumoniae
atgactgaattagataaacgtcaccgcagtagcatttatgacagcatggttaaatcacctaaccgtgctatgcttcgtgcgactggtatgacagataaggactttgaaacaccgattgtgggagtgatttcgacttgggcggaaaatacaccatgtaacattcacttgcatgatttcgggaaactggctaaagaaggtgtcaaatctgcaggcgcttggcctgtacagtttggaaccattaccgtagcagacgggatcgctatgggaacgcctggtatgcgtttctctctaacatctcgtgacatcatcgcggactccatcgaggcggctatgagtggtcacaacgtggatgcctttgtcgctatcggtggctgtgacaagaacatgcctggatctatgattgctattgctaatatggatatcccagctattttcgcctatggtggaactattgcaccgggaaatcttgatggtaaagatatcgacttggtttctgtctttgaaggtatcggaaaatggaaccacggtgacatgacagctgaggacgtgaaacgtcttgaatgtaatgcctgccctggccctggtggctgtggtggtatgtatactgctaataccatggcaactgctatcgaagttctagggatgagtttgccagggtcatcctctcacccagctgaatcagctgataagaaagaagatatcgaagcagcaggacgtgctgttgttaagatgttggaacttggtctcaaaccatcagatatcttgactcgtgaagcctttgaagatgctattactgtaacgatggctctcggtggttctacaaacgccactcttcacttgctcgccattgcccatgccgcaaatgttgacttgtcacttgaggacttcaatacgattcaagaacgtgtgcctcacttggccgacttgaaaccatctggtcagtatgtcttccaagacctctacgaagtcggtggtgtccctgcggttatgaagtacttgttggcaaatggtttccttcacggagatcgcatcacatgtactggtaagactgtagctgaaaacttggctgactttgcagacttgactccaggccaaaaagttatcatgccacttgaaaatccaaaacgtgcggatggtccgcttatcatcttgaacgggaaccttgctcctgacggtgcagttgccaaggtatcaggtgttaaagtgcgtcgtcacgttgggccagctaaggtctttgactcagaagaagatgcgattcaggccgttctgacagatgaaatcgttgatggcgatgtagtcgttgttcgttttgttggacctaaaggtggtcctggtatgcctgagatgctgtcactttcttcaatgattgttggtaaaggtcagggagataaggtggccctcttgacggacggacgtttctctggtggtacttatggtctggttgttggacatatcgctcctgaagctcaggatggtggaccaattgcctatctccgtaccggcgatatcgttacggttgaccaagataccaaagaaatttccatggccgtatccgaagaagaacttgaaaaacgcaaggcagaaacaaccttgccaccactttacagccgtggtgtcctcggtaaatatgcccatatcgtatcatctgcttcacgcggagccgtgacagacttctggaatatggacaagtcaggtaaaaaataa

SEQ ID NO: 160 - protein, 567 aa, Streptococcus pneumoniae
MTELDKRHRSSIYDSMVKSPNRAMLRATGMTDKDFETPIVGVISTWAENTPCNIHLHDFGKLAKEGVKSAGAWPVQFGTITVADGIAMGTPGMRFSLTSRDIIADSIEAAMSGHNVDAFVAIGGCDKNMPGSMIAIANMDIPAIFAYGGTIAPGNLDGKDIDLVSVFEGIGKWNHGDMTAEDVKRLECNACPGPGGCGGMYTANTMATAIEVLGMSLPGSSSHPAESADKKEDIEAAGRAVVKMLELGLKPSDILTREAFEDAITVTMALGGSTNATLHLLAIAHAANVDLSLEDFNTIQERVPHLADLKPSGQYVFQDLYEVGGVPAVMKYLLANGFLHGDRITCTGKTVAENLADFADLTPGQKVIMPLENPKRADGPLIILNGNLAPDGAVAKVSGVKVRRHVGPAKVFDSEEDAIQAVLTDEIVDGDVVVVRFVGPKGGPGMPEMLSLSSMIVGKGQGDKVALLTDGRFSGGTYGLVVGHIAPEAQDGGPIAYLRTGDIVTVDQDTKEISMAVSEEELEKRKAETTLPPLYSRGVLGKYAHIVSSASRGAVTDFWNMDKSGKK

SEQ ID NO: 161 - DNA, 1719 bp, Streptococcus sanguinis
atgaaagggaaagctatgacagataaggatattcgtcacagaagtaagatttatgacagtatggttaaatctcctaaccgtgccatgcttcgcgcgacggggatgactgataaagattttgaaacgcctattgttggggtgatttccacttgggcggaaaatacaccctgtaacatccatttgcatgacttgggcaagctagccaaggaaggtatcaaagcagagggcgcttggcctgttcagtacgggactattacggttgcggacggaattgccatgggaacgccgggtatgcgcttctctctgacctcacgcgatatcatcgcagactccatcgaggctgccatgggcgggcataatgtggatgctttcgtagctatcgggggctgtgataaaaatatgccaggctccatgattgccattgccaatatggatattcctgctgtctttgcctacggcggaacgattgcgccagggaagctggacggtaaggacattgacttggtttctgtctttgaaggaatcgggaaatggaaccatggtgatttgacggctgaggaagtacgacgcattgagtgtaatgcctgccctggccctggtggctgtggtggtatgtatacggccaatactatggcgacggctattgaagttctgggtatgagcctgccaggctcctcttctcaccctgctgagtctaaagacaagcaagaggatatcgaagcagctggtcgtgctgttgtgaaaatgctgaaaatggggctgaagccgtctgacatcttgacacgtgaagcctttgaagatgcaatcacggtgaccatggctctgggtggttctactaatgctaccctgcacttgctggccatggcgcacgcggccaatgttgagctgacgcttgatgactttaatgtcattcaagagaaggtaccgcatttggctgacttgaaaccatctggtcagtatgtcttccaagacctttatgaggttggtggggtaccggctgtgatgaaatatctcttggcgaacggcttcctgcatggtgatcgcatcacttgtacaggtaagactgttgcagagaatctggtagaatttgctgatctgacaccaggtcaaaaggtcattatgccgcttgaaaatccaaaacgtgcggacggtccgctcattatcttgcatggtaatctggctccagatggtgctgttgccaaggtttctggtgttaaagtgcgccgtcacgttggaccggctaaggtctttgactcagaagaagcagctattgatgctgtactggccgatgaagtggtcgatggcgatgtggtcgtggttcgctatgttggaccaaagggtggccctggtatgccagaaatgctgtcactttcttctatcatcgtagggaaaggtcaaggggacaaggtggcacttctaactgacggccgcttctcaggcggtacttacggcttggttgtcggacacattgctccggaagctcaggatggtggcccgattgcctatcttcgtacaggcgatatggtcacggttgaccaagataccaaggaaatctctatggcagtctctgacgaagagctggcgaaacgtaaggcagaaacgactattccaccgctttatagtcgcggggtacttggtaaatatgctcacatggtatcgtctgccgctaaaggtgctgttactgacttctggaaaccagaagaaacaggtaagaaatag

SEQ ID NO: 162 - protein, 572 aa, Streptococcus sanguinis
MKGKAMTDKDIRHRSKIYDSMVKSPNRAMLRATGMTDKDFETPIVGVISTWAENTPCNIHLHDLGKLAKEGIKAEGAWPVQYGTITVADGIAMGTPGMRFSLTSRDIIADSIEAAMGGHNVDAFVAIGGCDKNMPGSMIAIANMDIPAVFAYGGTIAPGKLDGKDIDLVSVFEGIGKWNHGDLTAEEVRRIECNACPGPGGCGGMYTANTMATAIEVLGMSLPGSSSHPAESKDKQEDIEAAGRAVVKMLKMGLKPSDILTREAFEDAITVTMALGGSTNATLHLLAMAHAANVELTLDDFNVIQEKVPHLADLKPSGQYVFQDLYEVGGVPAVMKYLLANGFLHGDRITCTGKTVAENLVEFADLTPGQKVIMPLENPKRADGPLIILHGNLAPDGAVAKVSGVKVRRHVGPAKVFDSEEAAIDAVLADEVVDGDVVVVRYVGPKGGPGMPEMLSLSSIIVGKGQGDKVALLTDGRFSGGTYGLVVGHIAPEAQDGGPIAYLRTGDMVTVDQDTKEISMAVSDEELAKRKAETTIPPLYSRGVLGKYAHMVSSAAKGAVTDFWKPEETGKK

SEQ ID NO: 163 - DNA, 1719 bp, Streptococcus thermophilus
atggaggaaaacatcgtgtctgaaaataacatgaaacaccgttcttctgtctacgatagcatggttaaatcacctaaccgtgctatgcttcgtgcgactgggatgacggatgatagttttgaaaagcctattgttggggttatctcaacttgggctgagaacacgccatgtaatatccacttgcacggttttggtcaaattgccaaagagggtgtcaaagatgcgggtgcttggccagttcaatttggtacaattaccgttgcagatggtattgccatggggacaccagggatgcgtttctcattgacatctcgtgatattattgctgactcaatcgaagctgctatgggtggtcacaatgtcgatgcctttgttgctattggtggctgtgataagaacatgccaggttcaatgattgctattgccaacatggatattccagctatttttgcttacggtggtacgattgcaccgggtaatcttaacggtaaggatatcgacttggtttctgttttcgaaggtatcggtaaatggaaccacggagatatgactgccgaagaggttaaaaatcttgaatgtaatgcttgccctggccctggtggttgtggtggtatgtatactgctaacacaatggcaacagcaattgaggttatggggatgagccttccaggatcatcatctcaccctgcagaatcagctgagaagaaggctgatatcgaagaagcaggtcgtgcagttgtaaaaatgctagaaatgggacttaagccatcagatatcttgacacgtgaagcctttgaagatgccatcacagttacaatggcgcttggtggttcaacaaatgccactcttcacttgcttgctatcgctcatgcggctaacgttgatttaacgcttgaagacttcaacgatttccaagagcgcgtgcctcacttggctgacttgaagccttcaggtcaatatgtcttccaagacctttacaatgttggtggtgtgccagccgttatgaaatatcttcttaagaatggttttcttcacggtgatcgtatcacgtgtactggtaagactgttgcagaaaatttggaagctttcgatgatttgacaccaggtcaaaaagttatcatgccacttgaaaatcctaaacgtgccgatggtccattgattatcttgaaaggtaacttggccccagaaggtgctgttgccaaagtatcaggtgttaaagtgcgtaacattactggtcctgctaaagtatttgactcagaagaagatgccatcgaggcagttctttctgacgaaatcgttgacggcgatgtagttgttgtacgttttgtaggtcctaagggtggtcctggtatgccagaaatgttgtcattgtcatcaatgattgttggtaaaggacaaggagacaaggttgccctcttgactgatggacgtttctcaggtggtacttacggacttgttgtaggtcatattgctcctgaagctcaagttggtggaccgattgcctacctccgtacaggtgatatggttacagttgaccaggataccaaagaaatcactatgcatgtaccagacgaagagttggcgaaacgtaaagcagaaactgagttaccaccactttatagccgtggtgtcctcggtaagtatgctcacatcgtttcatcagcatcacgtggtgcggttactgacttctggaatatggataaatcaggtaaagcttaa

SEQ ID NO: 164 - protein, 572 aa, Streptococcus thermophilus
MEENIVSENNMKHRSSVYDSMVKSPNRAMLRATGMTDDSFEKPIVGVISTWAENTPCNIHLHGFGQIAKEGVKDAGAWPVQFGTITVADGIAMGTPGMRFSLTSRDIIADSIEAAMGGHNVDAFVAIGGCDKNMPGSMIAIANMDIPAIFAYGGTIAPGNLNGKDIDLVSVFEGIGKWNHGDMTAEEVKNLECNACPGPGGCGGMYTANTMATAIEVMGMSLPGSSSHPAESAEKKADIEEAGRAVVKMLEMGLKPSDILTREAFEDAITVTMALGGSTNATLHLLAIAHAANVDLTLEDFNDFQERVPHLADLKPSGQYVFQDLYNVGGVPAVMKYLLKNGFLHGDRITCTGKTVAENLEAFDDLTPGQKVIMPLENPKRADGPLIILKGNLAPEGAVAKVSGVKVRNITGPAKVFDSEEDAIEAVLSDEIVDGDVVVVRFVGPKGGPGMPEMLSLSSMIVGKGQGDKVALLTDGRFSGGTYGLVVGHIAPEAQVGGPIAYLRTGDMVTVDQDTKEITMHVPDEELAKRKAETELPPLYSRGVLGKYAHIVSSASRGAVTDFWNMDKSGKA

SEQ ID NO: 165 - DNA, 1716 bp, Streptococcus suis
atgaccgatacaaacaaacttaaagactttcgacatcgcagctctgtttacgattcgatggtcaaatcgcccaaccgtgctatgttaagagcaacaggaatgaccgacgatagctttgaaaagcctattgttggggttatttcgacatgggctgaaaacacaccctgtaacatccaccttcatgactttggaaaattagccaaagaaggtgtcaaggaagcaggtgcctggcctgtccaatacggtaccatcaccgttgcagacggaatcgctatgggaactcctggtatgcgcttctccttgacttcacgtgatatcattgcagattctattgaggcagctatgggagggcacaacgtggatgcctttgtcgcaatcggtggctgtgataaaaacatgcctggttctatgattgctatcgccaatatggatatccctgctgtttttgcctacggcggaaccattgcgccaggtaatctcaatggtaaagacatcgacttggtatccgtttttgaaggaatcggaaaatggaacaacggtgacttgaccgctgaagaggttcgtcaaatcgagtgtaacgcttgccctggacctggtggttgcggtggtatgtacactgccaataccatggcgacagccattgaggtaatgggcatgtctattcctggctcttcttctcaccctgctgaatctcctgagaagaaggctgatattgaagaagctggtcgtgctgttgtacgcatgctagaacttggcatcaaaccatctgacattatgacgcgtgaagcctttgaagatgccattacagtcacaatggctctgggcggctcaaccaacgctactctgcacttgctggccattgcccatgctgccaacgttgatttgaccttggaagatttcaacgatttccaagagcgtgtgcctcatttggccgacttaaaaccatctggtaaatatgttttccaagacctctataatgtcggcggtgtccctgcggttatgaaatacttgctcaaaaacggcttccttcatggcgaccgcatcacatgtacaggtaaaaccgttgctgaaaacctaaagaattttgcagacttgactccaggtcaagatgtcatcatgccacttgaaaatccaaaacgagcggatggacctctgattatcttgaaaggtaaccttgctcctgaaggtgccgttgccaaggtttctggtgtgaaagtccgcaaccatacaggtccagccaaggtctttgattctgaagaagaagctatcgaagcagtcttgactgacgaaatcgtagatggcgatgtagtcgttgtccgctatgttggaccaaaaggcggtcctggtatgcctgaaatgctgtccctttcttctatgattgtcggaaaaggccaaggtgacaaggtagcccttctaacagacggtcgtttctctggtggtacctatggactggttgtgggacacatcgcacctgaagctcaggatggtgggccaattgcctacctccgtactggtgatttggtgacggttgatcaagataccaaagaaatcaccatgcacgtttctgaccaagaaatcgaagaacgcaagaaaacaactgttattccaccactctactctcgtggcgttctcggaaaatacgcccacactgtatcctctgcctctaaaggagccgttaccgacttctggagaccagaacgtacggggaaaaaataa

SEQ ID NO: 166 - protein, 571 aa, Streptococcus suis
MTDTNKLKDFRHRSSVYDSMVKSPNRAMLRATGMTDDSFEKPIVGVISTWAENTPCNIHLHDFGKLAKEGVKEAGAWPVQYGTITVADGIAMGTPGMRFSLTSRDIIADSIEAAMGGHNVDAFVAIGGCDKNMPGSMIAIANMDIPAVFAYGGTIAPGNLNGKDIDLVSVFEGIGKWNNGDLTAEEVRQIECNACPGPGGCGGMYTANTMATAIEVMGMSIPGSSSHPAESPEKKADIEEAGRAVVRMLELGIKPSDIMTREAFEDAITVTMALGGSTNATLHLLAIAHAANVDLTLEDFNDFQERVPHLADLKPSGKYVFQDLYNVGGVPAVMKYLLKNGFLHGDRITCTGKTVAENLKNFADLTPGQDVIMPLENPKRADGPLIILKGNLAPEGAVAKVSGVKVRNHTGPAKVFDSEEEAIEAVLTDEIVDGDVVVVRYVGPKGGPGMPEMLSLSSMIVGKGQGDKVALLTDGRFSGGTYGLVVGHIAPEAQDGGPIAYLRTGDLVTVDQDTKEITMHVSDQEIEERKKTTVIPPLYSRGVLGKYAHTVSSASKGAVTDFWRPERTGKK

SEQ ID NO: 167 - DNA, 1716 bp, Streptococcus mutans
atgactgacaaaaaaactcttaaagacttaagaaatcgtagttctgtttacgattcaatggttaaatcacctaatcgtgctatgttgcgtgcaactggtatgcaagatgaagactttgaaaaacctatcgtcggtgtcatttcaacttgggctgaaaacacaccttgtaatatccacttacatgactttggtaaactagccaaagtcggtgttaaggaagctggtgcttggccagttcagttcggaacaatcacggtttctgatggaatcgccatgggaacccaaggaatgcgtttctccttgacatctcgtgatattattgcagattctattgaagcagccatgggaggtcataatgcggatgcttttgtagccattggcggttgtgataaaaacatgcccggttctgttatcgctatggctaacatggatatcccagccatttttgcttacggcggaacaattgcacctggtaatttagacggcaaagatatcgatttagtctctgtctttgaaggtgtcggccattggaaccacggcgatatgaccaaagaagaagttaaagctttggaatgtaatgcttgtcccggtcctggaggctgcggtggtatgtatactgctaacacaatggcgacagctattgaagttttgggacttagccttccgggttcatcttctcacccggctgaatccgcagaaaagaaagcagatattgaagaagctggtcgcgctgttgtcaaaatgctcgaaatgggcttaaaaccttctgacattttaacgcgtgaagcttttgaagatgctattactgtaactatggctctgggaggttcaaccaactcaacccttcacctcttagctattgcccatgctgctaatgtggaattgacacttgatgatttcaatactttccaagaaaaagttcctcatttggctgatttgaaaccttctggtcaatatgtattccaagacctttacaaggtcggaggggtaccagcagttatgaaatatctccttaaaaatggcttccttcatggtgaccgtatcacttgtactggcaaaacagtcgctgaaaatttgaaggcttttgatgatttaacacctggtcaaaaggttattatgccgcttgaaaatcctaaacgtgaagatggtccgctcattattctccatggtaacttggctccagacggtgccgttgccaaagtttctggtgtaaaagtgcgtcgtcatgtcggtcctgctaaggtctttaattctgaagaagaagccattgaagctgtcttgaatgatgatattgttgatggtgatgttgttgtcgtacgttttgtaggaccaaagggcggtcctggtatgcctgaaatgctttccctttcatcaatgattgttggtaaagggcaaggtgaaaaagttgcccttctgacagatggccgcttctcaggtggtacttatggtcttgtcgtgggtcatatcgctcctgaagcacaagatggcggtccaatcgcctacctgcaaacaggagacatagtcactattgaccaagacactaaggaattacactttgatatctccgatgaagagttaaaacatcgtcaagagaccattgaattgccaccgctctattcacgcggtatccttggtaaatatgctcacatcgtttcgtctgcttctaggggagccgtaacagacttttggaagcctgaagaaactggcaaaaaatga

SEQ ID NO: 168 - protein, 571 aa, Streptococcus mutans
MTDKKTLKDLRNRSSVYDSMVKSPNRAMLRATGMQDEDFEKPIVGVISTWAENTPCNIHLHDFGKLAKVGVKEAGAWPVQFGTITVSDGIAMGTQGMRFSLTSRDIIADSIEAAMGGHNADAFVAIGGCDKNMPGSVIAMANMDIPAIFAYGGTIAPGNLDGKDIDLVSVFEGVGHWNHGDMTKEEVKALECNACPGPGGCGGMYTANTMATAIEVLGLSLPGSSSHPAESAEKKADIEEAGRAVVKMLEMGLKPSDILTREAFEDAITVTMALGGSTNSTLHLLAIAHAANVELTLDDFNTFQEKVPHLADLKPSGQYVFQDLYKVGGVPAVMKYLLKNGFLHGDRITCTGKTVAENLKAFDDLTPGQKVIMPLENPKREDGPLIILHGNLAPDGAVAKVSGVKVRRHVGPAKVFNSEEEAIEAVLNDDIVDGDVVVVRFVGPKGGPGMPEMLSLSSMIVGKGQGEKVALLTDGRFSGGTYGLVVGHIAPEAQDGGPIAYLQTGDIVTIDQDTKELHFDISDEELKHRQETIELPPLYSRGILGKYAHIVSSASRGAVTDFWKPEETGKK

SEQ ID NO: 169 - DNA, 1683 bp, Leptospira borgpetersenii
atgagcgatatattaaaaaaaagaagttcgatgactacggacggagataaccgcgcgcccaatcgagcgatgcttcgcgcggtcggctttacggacgaagatttccacaaacctatgatcggaatcgcttccacatggagcgaagtgacgccttgtaatattcatatcaataagttggccgaaaaagtcaaagagggcgttcgtacggcgggaggagttcctcaaatttacggaaccatcacggtttccgacggaattacgatgggtcacgaagggatgcatttttcacttccctccagagaagtgattgcggattcaatcgaaatcgtttccaacgcgatgagacacgacggagtgatcgcgatcggaggttgtgataagaacatgcccggatgtctcatggctctttgcagaatcgatgctccttctattttcgtttacggggggaccattcttccggggcattgcgacggtcaagacgtggatatcgtttccatcttcgaagctgttggtaaatttaatgcaggtaaaatttcaagagaagaattcattcgaatcgagcagaacgcgtgtcccggcgcaggaagttgcggggggatgtataccgcaaatacgatgtcctccgcgatagaagctcttgggatgagtctgccaggttcggcttccatgcccgcggtgagttctagaaaatcggaggattgttacgaggcgggaaaagctctcatcaatctcattcaaaagggagtcactccgaagcgaattcttaccaaaaaagcttttgagaacgcgatcaccgtagtgcttgtgttaggcggttcaaccaatgcggtccttcatttgattgcgatcgcgaaagagattggtgtggatcttactctcgaagactttgatcgaatcagtaaaaaaactcctcaccttgcggatttgaaaccgggtggtagatacgccatgaccgatctcgacaaagtgggcggggttcatggtgtgatgaagtatcttttgaaagaaggaatgcttcatggtgattgtcttacggttacgggaaaaacaattgcagaaaatctaatggatatgcccgatctcgttccaaaccagacgatcgtccgtaaaaaatcggaggcgctccatccttccggtcctcttgtgattttgaaaggaaaccttgccccggaaggtgcggttgctaaaatttccggtttgaagaaaatttccatcacgggcccggcgaaagtgttcgaatccgaagacgattgtttcaatgcgatcatgacggatcaaattaaaccgggcgacgtgattatcattcgttacgaaggtcccaaaggtggtcccgggatgagagagatgctcgcggtaacttcggcgcttgtcggaaaaggtttgggagaagacgtgggtctgatgacagacggtcgattcagtggaggaacgcacggtctcgtagtcggtcatatttctcccgaagcatttgatggaggtccgattgcgatcgttcaaaatggggatgcggttactatcgattccggtaaaaatttgctccaagttgaaatttctcaggaagaaattcagaaacggctaaaaaattggaaaccgattgaaccgagatataaatccggggttcttgcgaaatacgcaaaactggttcaatcggcgactaacggagcgattacgaatctgctttga

SEQ ID NO: 170 - protein, 560 aa, Leptospira borgpetersenii
MSDILKKRSSMTTDGDNRAPNRAMLRAVGFTDEDFHKPMIGIASTWSEVTPCNIHINKLAEKVKEGVRTAGGVPQIYGTITVSDGITMGHEGMHFSLPSREVIADSIEIVSNAMRHDGVIAIGGCDKNMPGCLMALCRIDAPSIFVYGGTILPGHCDGQDVDIVSIFEAVGKFNAGKISREEFIRIEQNACPGAGSCGGMYTANTMSSAIEALGMSLPGSASMPAVSSRKSEDCYEAGKALINLIQKGVTPKRILTKKAFENAITVVLVLGGSTNAVLHLIAIAKEIGVDLTLEDFDRISKKTPHLADLKPGGRYAMTDLDKVGGVHGVMKYLLKEGMLHGDCLTVTGKTIAENLMDMPDLVPNQTIVRKKSEALHPSGPLVILKGNLAPEGAVAKISGLKKISITGPAKVFESEDDCFNAIMTDQIKPGDVIIIRYEGPKGGPGMREMLAVTSALVGKGLGEDVGLMTDGRFSGGTHGLVVGHISPEAFDGGPIAIVQNGDAVTIDSGKNLLQVEISQEEIQKRLKNWKPIEPRYKSGVLAKYAKLVQSATNGAITNLL

SEQ ID NO: 171 - DNA, 1665 bp, Candidatus Vesicomyosocius okutanii
atgtgcatcccaagaaaatattcctcacaagttgttgatggatttgaacgcgcaccaagtcgtgctatgctttaccccattggttttaaaaaagatgattttagcaaaccccaggttggtatagcaagcacttggtcaatggtaacaccatgtaatatgcatattaataaattagctgataaagccgaaaaagggataaataacgcaggtggtaaaggtgttatctttaacaccattaccatatcagatggtatttctatgggctctgaaggtatgaaatattccttagtatcacgcgaagtcattgccgattcaattgaaacagttgttggttgtcaagggtttgatggtgtggttgctattggtgggtgtgataaaaatatgcctggttgtattattggcttagcacgtcttaatcgccctagtatttttgtttatggcggtactattcaaccgggtaaaaatcgtacagatgtggtaagtgttttcgaagcagttggccgattttctaaccatgaaattgatgaaatagaactagaaaatattgaaaaaacagccgttactggagcaggttcttgtggtggtatgtacactgctaatactatggcatcagcaattgaagcattaggtatgagtttacccaactccagcgcacaaaatgctatatcagatgataaaaataatgattgtatccaagctggagaagctattcttactttattaaataaagacattaaaccccgtgatataatgactatgaaagcattcgaaaatgccatcactgtaattattgcattgggtggctcaaccaatgctgtattgcatttaattgccatggcaaatgccgctgaggttaatctcaaaattgatgattttactcgcattggtaaaaaagtacctgttattgctgaccttaaaccatcaggtaaatatatgatgagtgaattggttgaaattgggggtacattaccactaatgaaaatgctacttgatgcaggactattacatggggattgcatgacagtaacaggaaaaactttagctaaaaatttaaaaaatgttcaatcatatgctgattcccaagaaattattagagcattagataacccaataaagaaagattcacaccttagaattttgcgtggtaaccttgcaattaatggtgctgtggcaaagattactggtaaagaaggttcaagtttcaaaggtacagctaaatgtttttctcatgaagaaggagcgcttaaggctattttaaatgaccaaataaaagcaggtaatgttatcgttattcgttacgaggggcctgttggtggtcctggtatgcgtgaaatgcttgctcctacttctgcagttatggggaaaggattgggtggtaaaattgcacttattactgatgggcgcttctctggtggtacacatggttttgtagtcgggcatatcactcctgaagcctttaaaggtggagtgctagcagtggttgaagatggtgatgaaattataattgatgcacaaaataacgttttagaactattagttgatcaagctattattgataaacgcttatctaaatggacgcaacctaaaccaaactacactaaaggtgtattagcaaaatttgcaaaactagctaaatctgcttctgaaggtgcagttactgattaa

SEQ ID NO: 172 - protein, 554 aa, Candidatus Vesicomyosocius okutanii
MCIPRKYSSQVVDGFERAPSRAMLYPIGFKKDDFSKPQVGIASTWSMVTPCNMHINKLADKAEKGINNAGGKGVIFNTITISDGISMGSEGMKYSLVSREVIADSIETVVGCQGFDGVVAIGGCDKNMPGCIIGLARLNRPSIFVYGGTIQPGKNRTDVVSVFEAVGRFSNHEIDEIELENIEKTAVTGAGSCGGMYTANTMASAIEALGMSLPNSSAQNAISDDKNNDCIQAGEAILTLLNKDIKPRDIMTMKAFENAITVIIALGGSTNAVLHLIAMANAAEVNLKIDDFTRIGKKVPVIADLKPSGKYMMSELVEIGGTLPLMKMLLDAGLLHGDCMTVTGKTLAKNLKNVQSYADSQEIIRALDNPIKKDSHLRILRGNLAINGAVAKITGKEGSSFKGTAKCFSHEEGALKAILNDQIKAGNVIVIRYEGPVGGPGMREMLAPTSAVMGKGLGGKIALITDGRFSGGTHGFVVGHITPEAFKGGVLAVVEDGDEIIIDAQNNVLELLVDQAIIDKRLSKWTQPKPNYTKGVLAKFAKLAKSASEGAVTD

SEQ ID NO: 173 - DNA, 1680 bp, Candidatus Ruthia magnifica
atgcgaagaaaaattatgtacaacccaagaaaatactcctcacaagttgttgacggatttgaacgcgcgccaagtcgtgccatgctttatccagttggatttacaaaagaggattttaacaagcctcaagtcggcatagcaagcacttggtcaatggtaacaccgtgtaatatgcacattaataaattggctgatgagacattaaaaggggtaaatgccacaggtggtaaagccattatttttaacactattactatttcagatggtatttctatgggctctgaaggcatgaagtactctttagtctcacgtgaagttattgccgattcaattgaaactgtggttggttgtcaaggttttgatggtgtggttgcaattggtggttgcgataaaaacatgcctggttgtattattggtttggtacgtcttaatcgccctagtatttttgtttatggaggcacaatccagccgggtaaaaatcatacagatgtggtgagtgtttttgaagcagttggccaatttgccaatcatacaattgatgcgattgaattagaaaatattgaaaaaatagctatccctggtccaggctcttgtggcggtatgtatacggctaacactatggcatcagcgattgaagcattaggtatgagcctgccaaattctagtgcgcaagatgctatttcagatgataaaaataacgactgtgttcaagctggacaggccgtccttaatttattaaacaaagacattaaacctcgtgacattatgaccatgaaggcatttgaaaatgctattaccgtaattattgcattgggtggctcaactaatgctgtattgcatttaattgccatggcaagtgctgctgaggttaatcttaaaattgatgactttactcgcattggccaaaaagtacccgttattgctgaccttaaaccatcaggcaaatacatgatgagtgaattggttaaaattggcggtacattgccgctaatgaaaatgttacttgatgcaggattattgcacggagactgcctaacagtaacaggaaaaactctagctgaaaatttagaaaatgttaagccatacgctgattctcaagaaatcattagagcactagacaacccaataaaaaaagattcacaccttagaattttacgtggcaatcttgcaaccgatggtgctgttgcaaaaattactggcaaagaaggtttgagtttcaaaggcaatgcgaaatgtttttctcgtgaagaggatgcgcttgaagccattttaaataatcaaataataacaggtgatgtgattgttattcgctatgaaggccctgtcggaggtcctggtatgcgcgaaatgctcgcccctacttctgcagttatgggcaaaggcttaggtgataaagttgcgttaattaccgatggtcgtttttctggcggtacacatggttttgtagtcggtcacatcacccctgaagcctttgaaggtggtgtactggctgtggttaaagatggagatgaaatcttaattgatgcacaaaacaacgttttagagttattagttgagcaagcaattatcgataaacgtctatataattggacacaacccaaaccaaactacaccaaaggtgtattggctaaatttgcaaagttggctaaatctgcctctgaaggtgcagtgactgattag

SEQ ID NO: 174 - protein, 559 aa, Candidatus Ruthia magnifica
MRRKIMYNPRKYSSQVVDGFERAPSRAMLYPVGFTKEDFNKPQVGIASTWSMVTPCNMHINKLADETLKGVNATGGKAIIFNTITISDGISMGSEGMKYSLVSREVIADSIETVVGCQGFDGVVAIGGCDKNMPGCIIGLVRLNRPSIFVYGGTIQPGKNHTDVVSVFEAVGQFANHTIDAIELENIEKIAIPGPGSCGGMYTANTMASAIEALGMSLPNSSAQDAISDDKNNDCVQAGQAVLNLLNKDIKPRDIMTMKAFENAITVIIALGGSTNAVLHLIAMASAAEVNLKIDDFTRIGQKVPVIADLKPSGKYMMSELVKIGGTLPLMKMLLDAGLLHGDCLTVTGKTLAENLENVKPYADSQEIIRALDNPIKKDSHLRILRGNLATDGAVAKITGKEGLSFKGNAKCFSREEDALEAILNNQIITGDVIVIRYEGPVGGPGMREMLAPTSAVMGKGLGDKVALITDGRFSGGTHGFVVGHITPEAFEGGVLAVVKDGDEILIDAQNNVLELLVEQAIIDKRLYNWTQPKPNYTKGVLAKFAKLAKSASEGAVTD

SEQ ID NO: 175 - DNA, 1689 bp, Methylococcus capsulatus
atgaccgacaagcacccccgtccccattcgtcccaggtcgtcgacggcatggagcgcgccccgagccgcgcgatgctgcacgccgtcggcttcgccgatgccgacttcgccaaaccgcagatcggcatcgcttccacctgggcgatggtgacgccgtgcaacatgcacatcaacaagctcgccgaggacgcagcacgcggcgtcgacggcggcggcggcaaggcagtgatcttcaacaccatcaccatttccgacggcatctcgatgggcaccgaaggaatgaaatactccctcgtgtcgcgggaagtcatcgccgactcgatcgaaaccgtggtggcctgtcagggttatgacggcgtggtcgccatcggcggctgcgacaagaacatgcccggctgcctgatcgccctcgcccgcctcaaccgtccggcggtgttcgtctatggcggcaccatcctgccgggctgccacgacggcaagaagctggacgtggtgtcggtgttcgaagcggtcggcgcccgcgccaaccaccgcatcgacgatgccgaactgcacgccatcgaatccaatgccatccccggtccgggctcctgcggtggcatgtataccgccaacaccatggcctccgccatcgaggcattagggatgagcctgccgggcagttcggcccaggtggccatttcccgcgccaaggaactggattgcgagcgggccggcgcgcaggtcctcaagctcctggacctggggctcaaaccccgcgacatcatgaccaagaaggcgttcgagaacgccatcacggtggtgatcgccctgggcggctccaccaacgccgtgctgcacctcctggccatggccaacgcctgcggcgtcgacctgaagctcgacgatttcacccgcatcgggcgcaaagtgccgatgctggcggatctgaaacccagcggcagatactccatggccgaactggtggaaatcggcggcatccagccgctgatgaagaccttgctggacgcgggactcctgcacggcgactgcatgaccgtaaccggcaagaccctggaagaaaacctggccgacgcgcccgactacccggccggacaagacatgatccggtcgctggacaaccccatcaaaaaggacagccatctggtgatcctcaagggcaacctggcgccggaaggcgcggtcgccaagatcaccggcaaggaaggactgagcttcaccggcaccgcccgcgtattcgactgcgaggaagcggcgctcacggccatcctcgacggcacgatcgtgaaaggcgacgtcatcgtcatccgctatgaaggccccaagggcggccccggcatgcgcgagatgctctcgccgacctcggcggtcatgggcaagggattgggcaaggaggtcgccctcatcaccgacggccgcttttccggcggcacccacggcttcgtggtcggccacatcacgccggaagcctacaccggcggccccctggcgatcgtccgggacggcgataccatcaccatcgacgccgagacccgcgaattgagcctgcacgtcaccgacgatgaaatcggccggcgcctggcgcagtggactcaaccggcgccgcgctacaccaagggcgtgctggccaaatacgccaggttggtgagcccggcctcggaaggcgccgtcaccgacgacggcctctga

SEQ ID NO: 176 - protein, 562 aa, Methylococcus capsulatus
MTDKHPRPHSSQVVDGMERAPSRAMLHAVGFADADFAKPQIGIASTWAMVTPCNMHINKLAEDAARGVDGGGGKAVIFNTITISDGISMGTEGMKYSLVSREVIADSIETVVACQGYDGVVAIGGCDKNMPGCLIALARLNRPAVFVYGGTILPGCHDGKKLDVVSVFEAVGARANHRIDDAELHAIESNAIPGPGSCGGMYTANTMASAIEALGMSLPGSSAQVAISRAKELDCERAGAQVLKLLDLGLKPRDIMTKKAFENAITVVIALGGSTNAVLHLLAMANACGVDLKLDDFTRIGRKVPMLADLKPSGRYSMAELVEIGGIQPLMKTLLDAGLLHGDCMTVTGKTLEENLADAPDYPAGQDMIRSLDNPIKKDSHLVILKGNLAPEGAVAKITGKEGLSFTGTARVFDCEEAALTAILDGTIVKGDVIVIRYEGPKGGPGMREMLSPTSAVMGKGLGKEVALITDGRFSGGTHGFVVGHITPEAYTGGPLAIVRDGDTITIDAETRELSLHVTDDEIGRRLAQWTQPAPRYTKGVLAKYARLVSPASEGAVTDDGL

SEQ ID NO: 177 - DNA, 1662 bp, unknown
  uncultured marine bacterium EB80_02D08
atgacaaatagaaaatattcaaaagaacttttagatggaccaaatcaagcagcatcaagatcaatgcttagaggagtaggatttacatctgatgatttcaagaagccacttgtaggaattgcatcaactggggcaaaagttactccatgcaatatgcatattaatcagctgtcagaaattgttgagcattcagttgataattccggaggtaaaggagtgctattcaatactattacagtttctgatggtatatcaatgggaacacaaggcatgaaatactcactcgtttcaagagaagtcatagcagattctatagaaactgttgtgggctgtcttggttatgatggtgttatagcagttggtggatgtgataaaaatatgcccggatgtattatcggcatggcaaggcttaatagaccttccatatttatatatggtggctcaatcagacccagtgaagaaaataccgattatgtaactgtatgtgaaaagactggtgagttttctaaaggcgatctagacgaatctcaactaattcatgtagaaaaaatatctgtaaagggtcctggatcctgtggaggtatgtatacagccaatactatggcatctgctattgaggcattgggtatgagtcttcctggaagtagcagtcaagatgctgtctcaaatgataaagaagatgattgcataaaagctggtatagcgatcatgggcttattagaaaaagacatcaagccttcagacattatgacaaaaaaagcttttgagaattctataactatggtgattgctttaggcggttccacaaatgcagtacttcatttacttgctatggctgatgcaattggagttgatttaacgcttgatgactttacaagaatcggtaaaaagacgccagtcttagcagatttaaagccttttggctctcattatatgtctgagcttaatgcaaatggagggatacagccgctaatgaaaacccttttagataaaggcttacttcatggtgattgtcttactgttacagggaaaacactctcagaaaatctttctttagttaaaccttatgaattacatcaagatattatcaaggagtttgatagtccaataaaagctaatagtcatctcaggatactatatggaaatttagctgaagaaggagcggttgcaaaaataacaggaaaagagggaacttcttttgaaggtagcgctcgagtttttaattcagaggaagaaggcgttgaggctattttatcaaaatcaattaaacctggcgacgttgtagtaataagatatgagggaccaaaaggtggtcctgggatgagagaaatgttgaagcctacttcggcaatcatgggccaaggcctgggagataaagttgcatttattaccgatggtcgtttttcaggaggtactcatggttttgttgttggacacattacaccagaagcggcagatggtgggctaatagcaattattgaagatggtgattcaatactaattgatgcaaactcggataaactagtactgaatatctctgatgatgagatttcaactagacttagtaaatgggttaaccctaaaacgcctccaagaaaaggtgttctagcaaaatttgcacgaaatgttaaatcagcaagtcttggagcggtgacagattaa

SEQ ID NO: 178 - protein, 553 aa, unknown
  uncultured marine bacterium EB80_02D08
MTNRKYSKELLDGPNQAASRSMLRGVGFTSDDFKKPLVGIASTGAKVTPCNMHINQLSEIVEHSVDNSGGKGVLFNTITVSDGISMGTQGMKYSLVSREVIADSIETVVGCLGYDGVIAVGGCDKNMPGCIIGMARLNRPSIFIYGGSIRPSEENTDYVTVCEKTGEFSKGDLDESQLIHVEKISVKGPGSCGGMYTANTMASAIEALGMSLPGSSSQDAVSNDKEDDCIKAGIAIMGLLEKDIKPSDIMTKKAFENSITMVIALGGSTNAVLHLLAMADAIGVDLTLDDFTRIGKKTPVLADLKPFGSHYMSELNANGGIQPLMKTLLDKGLLHGDCLTVTGKTLSENLSLVKPYELHQDIIKEFDSPIKANSHLRILYGNLAEEGAVAKITGKEGTSFEGSARVFNSEEEGVEAILSKSIKPGDVVVIRYEGPKGGPGMREMLKPTSAIMGQGLGDKVAFITDGRFSGGTHGFVVGHITPEAADGGLIAIIEDGDSILIDANSDKLVLNISDDEISTRLSKWVNPKTPPRKGVLAKFARNVKSASLGAVTD

SEQ ID NO: 179 - DNA, 1599 bp, unknown
  uncultured marine gamma proteobacterium EBAC31A08
atgcttagaggagtaggtttcacatctgaggmtttcacaaaaccatttgttgggattgcttccacaggagcaaaagtaaccccatgcaatatgcacataaatgcactttcagagatcgttgagaaatcagttgatagttcaggaggaaagggtgttctttttaatactattactgtttccgatggaatttctatgggtacacagggtatgaaatattctcttgtttctcgagaggtaattgcagattcaatagaaactgttgtgggatgtcttggttatgatggagttattgctgtcggtggttgtgataaaaatatgcctggatgcattattggaatggcaagattaaatagaccatcaatatttatatatggtggttctatcaaacctagtaaagaaaataccgactatgttactgtttgtgagaaaactggagagtactcaaaaggcgatcttaaagaatctgaattaattcatgtagaaaaaatttccgtaaaagggcctggatcttgtgggggaatgtatacggcaaatactatggcttctgcgattgaagctctaggcatgagtcttcctggaagcagcagtcaagatgcaatttcacacgacaaagaagatgattgttttaaggctggcgaagcgataatgaatttattagaaaaagatattaagccttcagatattatgactaagaatgcttttgagaatgctataacaatggtaattgctctaggaggttcaactaatgcagttctgcatttattggccatggcgcattcaataggggttgatttagagctagatgactttacaagaataggaaaaaaaacacccgttatggcagatcttaagccctttggttctcattatatgtctgaactcaatgctaatggcggtattcagccactaatgaaaactttgcttgagaagggattactacacggcaattgtcttaccgttaccggtcagacgcttgctgaaaatctttctggaataaaaccttacgagcctgatcaagagataattaaatcatttgataatccaattaaatcaaatagccatcttagaattctgtatggcaacttagcgaaagatggtgcagttgcaaaaattacgggtaaagaaggaacttcctttgaaggaagtgctcgtgtatttgattcagaagaagaaggggttaaagcaatcctatctaaatctataaaagctggagatgttgttgtaattagatatgaagggccaaaaggaggtccaggcatgagagaaatgctaaaaccaacatctgccataatgggtcaaggtcttggcgatcaggtagcttttataacagacggtcgtttttcaggaggcactcatggatttgttgttgggcacattactccagaggctgcagatggcggcttaattgcaataattaaagatggcgactctatattaattgatgcagattctgataagttaattcttaatatttctgaggatgaaatttcaaatagactaagtagatgggtaaacccaaaaacgcctcccaaaaaaggagtcttagcaaaatttgcaaaaagtgttaaatcagctagtcttggagcggtaacagattaa

SEQ ID NO: 180 - protein, 532 aa, unknown
  uncultured marine gamma proteobacterium EBAC31A08
  misc_feature (11)..(11): Xaa can be any naturally occurring amino acid
MLRGVGFTSEXFTKPFVGIASTGAKVTPCNMHINALSEIVEKSVDSSGGKGVLFNTITVSDGISMGTQGMKYSLVSREVIADSIETVVGCLGYDGVIAVGGCDKNMPGCIIGMARLNRPSIFIYGGSIKPSKENTDYVTVCEKTGEYSKGDLKESELIHVEKISVKGPGSCGGMYTANTMASAIEALGMSLPGSSSQDAISHDKEDDCFKAGEAIMNLLEKDIKPSDIMTKNAFENAITMVIALGGSTNAVLHLLAMAHSIGVDLELDDFTRIGKKTPVMADLKPFGSHYMSELNANGGIQPLMKTLLEKGLLHGNCLTVTGQTLAENLSGIKPYEPDQEIIKSFDNPIKSNSHLRILYGNLAKDGAVAKITGKEGTSFEGSARVFDSEEEGVKAILSKSIKAGDVVVIRYEGPKGGPGMREMLKPTSAIMGQGLGDQVAFITDGRFSGGTHGFVVGHITPEAADGGLIAIIKDGDSILIDADSDKLILNISEDEISNRLSRWVNPKTPPKKGVLAKFAKSVKSASLGAVTD

SEQ ID NO: 181 - DNA, 1659 bp, unknown
  uncultured marine gamma proteobacterium EBAC20E09
atgagctctagaaaatattcaaaagaccttgttgatggcccaaatcaagctgcatcaagatcaatgctgcgtggggttggatttactactgaagatttttcaaaatcttttgtaggcattgcatcaacaggtgcaaaagttacaccgtgtaatatgcatatcaataaacttgcagaagttgttgagaattcggtgaatgtatctggaggtaaaggagtactttttaatactattactgtatcagacggcatatcaatgggaactcaaggcatgaaatattctcttgtatcaagagaggttatagctgattcaattgaaacagttgttggttgtttaggttatgatggcttaatcacaattggtggctgtgataagaacatgcctggctgtttgataggcatggcaagattgaaccgaccatccattttcatttatggggggtcaattaagccaagtaatgaaaaaaccgactatgtcacagtatcagaaaaggttggtgaattctccaaaggcgacattgatgaaaaagaactcattcattatgaaaaaatttcagtagaaggcccaggatcatgcggtggtatgtataccgcaaatacaatggcttcagctatcgaagctttaggaatgagtttaccaggcagcagcagtcaagatgcagtttcaaaatctaaaaatgaagattgcatttctgcaggaatagccataatgaatttgcttgaaaaagatttaaaaccctctgacattatgacaaaggaggcttttgaaaatgcaattacagttgttattgcattaggtggatcgacaaatgctgttcttcatttattagctatggctcatgccgtaggtgtcgaacttcaattggatgattttacaaaaattggaaaactcactccggtacttgcagacctcaaaccatttggtaatcattttatgtctgagttaaatgcaaacggtggaatacagccactaatgaaaagtttattagataaaggaatgctgcatggaaattgtttgacggttactggtaattcattagaagaaaatttaaaagatatagagccgtataaagatgaaaaaataataaaaagcttagataatccaattaaatctgatagtcatttaagagtgttatatgggaacttagctaaggatggcgctgttgcaaaaattacaggaaaggagggcttttcatttgaaggcaaagccaaagtatttaactcggaagaagatggagttcaggcaatccttgcaaaaaaaattgttccaggtgatgtagttgtaattagatatgagggaccaaaaggtggtccgggcatgagagaaatgttaaagccaacatctgcgatcatggggttaggcttaggagataaagttgcttttataactgacggtagattttctggaggaactcatggatttgttgtgggccatgtatctccagaggcagcagatggaggcctaattgctttaatcaaagatggagacaatatcttgatagatgcagaaaatgatgaattaatactaaaggttgatcaagacgaaattgatttaagaaagaagaactggaaaaatcctactaatcctcctaaaaaaggagttcttgcaaagtatgctgcaagtgtaaaatctgccagcttaggagcaattactgattaa

SEQ ID NO: 182 - protein, 552 aa, unknown
  uncultured marine gamma proteobacterium EBAC20E09
MSSRKYSKDLVDGPNQAASRSMLRGVGFTTEDFSKSFVGIASTGAKVTPCNMHINKLAEVVENSVNVSGGKGVLFNTITVSDGISMGTQGMKYSLVSREVIADSIETVVGCLGYDGLITIGGCDKNMPGCLIGMARLNRPSIFIYGGSIKPSNEKTDYVTVSEKVGEFSKGDIDEKELIHYEKISVEGPGSCGGMYTANTMASAIEALGMSLPGSSSQDAVSKSKNEDCISAGIAIMNLLEKDLKPSDIMTKEAFENAITVVIALGGSTNAVLHLLAMAHAVGVELQLDDFTKIGKLTPVLADLKPFGNHFMSELNANGGIQPLMKSLLDKGMLHGNCLTVTGNSLEENLKDIEPYKDEKIIKSLDNPIKSDSHLRVLYGNLAKDGAVAKITGKEGFSFEGKAKVFNSEEDGVQAILAKKIVPGDVVVIRYEGPKGGPGMREMLKPTSAIMGLGLGDKVAFITDGRFSGGTHGFVVGHVSPEAADGGLIALIKDGDNILIDAENDELILKVDQDEIDLRKKNWKNPTNPPKKGVLAKYAASVKSASLGAITD

SEQ ID NO: 183 - DNA, 1659 bp, unknown
  uncultured gamma proteobacterium eBACHOT4E07
atgagctctagaaaatattcaaaggaattagttgatggtccaaatcaggccgcatctcgttctatgcttcgaggtgtaggatttacatctgaggactttacaaagccatttgttggaattgcatcaactggagccaaagttacaccatgtaatatgcatatcaatcaattatcagaattggtagaagactcaataaatgcatctggtggcaaaggtgttttatttaatacaattactgtttctgatggcatttcaatgggaacgcaaggaatgaaatattctcttgtttcaagagaagttattgctgactcaattgaaactgttgtaggttgccttggatatgatggattaattgcaattggtggatgtgataagaacatgcctggatgtcttattggtatggcaagattaaatagaccgtcaatatttatttatggtggatctataaaaccaagtaatgagaatacggactatgtcactgtctcagaaaaagttggagaattctcaaagggctctataaatgaagatgagctaattcattatgaaaagatatcagttgatggaccaggctcatgtggcggaatgtatacagcaaatacaatggcatctgccatagaggcattaggaatgagtttgccaggtagcagtagccaagatgcaacatctaaatcaaagaacgctgattgtgtgaatgctggatcggcaatcatgaatttactagataaagatattaaaccttctgacattatgacaagagaagcatttgaaaatgctataactgttgtaatagctctaggaggatcaacaaatgccgttcttcatttattggccatggctcattcaattggagttgaactttgcttagatgactttacttcaattggaaagaaaacacctgtattagcggacctaaaaccctttggaaaacactatatgtctgagcttaatgcaaatggaggaattcagcccttaatgaaaactcttttagacaaaggacttcttcatggtcaatgtatgacagttacaggcaataccttagaagaaaatttaaaagacataaaagcatatgagacgagtgaaataattaaagattttaataatccaatcaaaaaagatagtcatcttagaattttatacggcaaccttgctaaagatggcgcggttgcaaaaattacaggtaaagaaggaacatcttttgaaggaaaagcaaaagtatttaattcagaagaagagggcgtaagtgcgattctatcaaatcagattaatgatggtgatgtaatcgtaataaggtatgagggtccaaagggtgggcctggcatgagagaaatgctaaaacctacttctgcaatcatgggattaggactaggagataaaataggatttattacagatggaagattttcaggtggcacccatggttttgtagttggacatgtttctccagaagcagctgagggtggtttaatagcattagttgaagatggagatactatacttattgatgcagaaagtgatcagcttgttctaaaagttgatgatgatgaaattaaaagaagacaatcaatttggaaaaatccaaacagtaaaccaaaaaaaggagtacttgctaagtatgctgagagcgtaaaatctgcaagcctgggagctataactgattaa

SEQ ID NO: 184 - protein, 552 aa, unknown
  uncultured gamma proteobacterium eBACHOT4E07
MSSRKYSKELVDGPNQAASRSMLRGVGFTSEDFTKPFVGIASTGAKVTPCNMHINQLSELVEDSINASGGKGVLFNTITVSDGISMGTQGMKYSLVSREVIADSIETVVGCLGYDGLIAIGGCDKNMPGCLIGMARLNRPSIFIYGGSIKPSNENTDYVTVSEKVGEFSKGSINEDELIHYEKISVDGPGSCGGMYTANTMASAIEALGMSLPGSSSQDATSKSKNADCVNAGSAIMNLLDKDIKPSDIMTREAFENAITVVIALGGSTNAVLHLLAMAHSIGVELCLDDFTSIGKKTPVLADLKPFGKHYMSELNANGGIQPLMKTLLDKGLLHGQCMTVTGNTLEENLKDIKAYETSEIIKDFNNPIKKDSHLRILYGNLAKDGAVAKITGKEGTSFEGKAKVFNSEEEGVSAILSNQINDGDVIVIRYEGPKGGPGMREMLKPTSAIMGLGLGDKIGFITDGRFSGGTHGFVVGHVSPEAAEGGLIALVEDGDTILIDAESDQLVLKVDDDEIKRRQSIWKNPNSKPKKGVLAKYAESVKSASLGAITD

SEQ ID NO: 185 - DNA, 1686 bp, Alcanivorax borkumensis
atgagtgactcaaagggcgatccgcgtcgccgccattcagcaaaggtcgtggacggccccggtaaatccgccagccgggccatgctgcgggcggtggggtttaccgatgaggattttcataaaccccaggtgggcattgcttctacttggagtcaggtgacgccgtgcaatagccatatcggtgagctcgccgaaaaagcctgcgctggagccgatgcggccggcggcaaaggggtaattttcaataccatcaccatctccgatggcatcgccaatggtaccgaagggatgaagtattcgttggtctcccgcgaggtgattgccgattccattgaaaccgtggcggcttgtgaaggctttgacggcctggtagctcttggtggctgcgataagaacatgcccggttgcctaatgggcatggcgcggctgaatcgccccagcgtctttgtctacggcggcaccatcatgcccggcaagggccacacggatattgtttctgtgttcgaagccatgggagcccattcccgcggcgacatggacaaaatcgaactcaagcagatagaagaaactgccattcccgggcccggtgcttgcggcggcatgtacacggccaacactatggcctcggctattgaagcgctgggcatgagcctgccgggcagctccgcacagaatgcggtgtcggaagagaagcgtgatgattgccagcgcgccggcgaagcagtgttggcgctactggaacaggacatcaagccctcggacatcatgacgcgggctgcatttgagaacgccatcactgtggtgatcgccctgggcggttccaccaatgcggtgctgcacctgatcgccatggcgcgcaccgtgggggtgccgctgtcgctggatgactttaccgagatcggcaggcgggtgccggtgctggcggacctgcgccccagtggccattacatgatgagcgagttggtggccatcggcggtattcagccgttgatgaaggtgctgttggaggcgggtttgctgcagggtgattgcctgacggtcaccggccgtaccttggctgagaacctggcggatgtcagtccttatccactggatcagacgatcatcgcgccactgtctgcgccgctgaaagcagaaagtcacctgcgcatcctttatggcaatttggcgccggatggcgcagtggccaagatcaccggcaaggaaggcacccacttttccggcccggcccgggtgttcggttcggaagaagaagcgcagcagcggatcaatgatgggactgtggtgtccggggacgtggtggtgatccgctatgaaggcccccgcggcggcccaggcatgcgtgaaatgctcacccccacctctgccatcatggggcgcggcctgggtgacgaggtggcgctgattaccgatggtcgcttttccggcggcagccatggtttcgtggtaggccacgtgaccccagaagctttcgatggtggtccgctggcattattggaaaacggtgaccaaattaccattgatgccgaagccaacaccctggtcgtggcgctgtctgatgcggagttggcgcgccgccgtgctaactggcaacagccagcaccacgctatacccgtggtgtgctggccaaatacgcacggctggtgggttcggccagcgaaggcgcgctgacggacttaggttaa

SEQ ID NO: 186 - protein, 561 aa, Alcanivorax borkumensis
MSDSKGDPRRRHSAKVVDGPGKSASRAMLRAVGFTDEDFHKPQVGIASTWSQVTPCNSHIGELAEKACAGADAAGGKGVIFNTITISDGIANGTEGMKYSLVSREVIADSIETVAACEGFDGLVALGGCDKNMPGCLMGMARLNRPSVFVYGGTIMPGKGHTDIVSVFEAMGAHSRGDMDKIELKQIEETAIPGPGACGGMYTANTMASAIEALGMSLPGSSAQNAVSEEKRDDCQRAGEAVLALLEQDIKPSDIMTRAAFENAITVVIALGGSTNAVLHLIAMARTVGVPLSLDDFTEIGRRVPVLADLRPSGHYMMSELVAIGGIQPLMKVLLEAGLLQGDCLTVTGRTLAENLADVSPYPLDQTIIAPLSAPLKAESHLRILYGNLAPDGAVAKITGKEGTHFSGPARVFGSEEEAQQRINDGTVVSGDVVVIRYEGPRGGPGMREMLTPTSAIMGRGLGDEVALITDGRFSGGSHGFVVGHVTPEAFDGGPLALLENGDQITIDAEANTLVVALSDAELARRRANWQQPAPRYTRGVLAKYARLVGSASEGALTDLG

SEQ ID NO: 187 - DNA, 1713 bp, Chromohalobacter salexigens
atgagccagcaggactcccccgccaacgccgatcaccgtcgccgccattcctccatcgtggtcgacggccccggcaaggccgccagtcgcgccatgctgcgtgccgtcggtttcaccgacgaggatttcaagaagccgcaggtggggatcgcctcgacctggagtcgcgtcacgccgtgcaacagccacatcaacgtgttggccgatgccgccagtgacggcgccgacgccgccggtggcaagggcgtggtcttcaataccatcaccatcagcgacggcatcgccaacggcaccgaaggcatgaagtattcgatggcctcgcgcgagatcatcgccgattccatcgaggcggtctccggctgcgaggggttcgacggggtggtggccatcggtggctgcgacaagaacatgcccggctgcatgatcggcctggcacgtctcaaccggcccagcatcttcgtctacggcggtaccatccagcccggtgccgggcacaccgacctggtctcggtattcgaggcgatgggcgcctactcccagggcaacaagtcgctgatcgaggtcaagcagatcgaggaagtcgcgattcccgggccgggctcctgtggcggcatgtacaccgccaacaccatggcctcggcgatcgaggccatgggcatgagcctgcccaattcgtcggctcaggacgcggtatcccagagcaagaaggacgatagtcgcgccgccggcgaggccgtgctcaagctgctcgaactggacatcaagccctcggacatcatgacccgcaaggcgttcgagaacgccatcaccgtggtcatcgccctcggcggttccaccaatgccgtgctgcacctgattgccatggccaacaccatcggggtcgagctctcgctcgacgactttaccgagatcggcaagcgcgtcccggtgctcgccgacctgcgccccagcggtcattatctgatgagcgagctggtggcgatcggcggcattcagccgatgatgaagattctgctcgatgcggggctgctccacggcgattgcctgaccgtgaccggcaagacgctggccgagaacctggccgacgtgacgccttatccgacggggcaggaaatcatcaagccgctggaggcaccgatcaaatcgagcagccacctgcgcattctctacggcaacctggcgccagagggagcggtggccaagatcaccggcaaggaaggtacccgcttcaccgggcgtgctcgcgtgttcaactccgaggaggaggcccaggcgcgcatcaacgacctgaccgtggccgccggtgacgtcgtcgtgattcgctacgaggggccgaagggcggtcccggcatgcgcgaaatgctgacgccgacctcggcgatcatgggccgtggcctgggcgacaaggtggccttgatcaccgatggacgcttctccggcggcagccatggcttcgtggtcggtcacatcacgccggaagccttcgtcggcggccccatcggcctggtcgaggacggtgacgagatcaccatcgacgccgagaacgacatcatgacgctgcatatcgacgacgccgagatggcgcgccgccgtgcggcctggaagcgcccggcaccgcgttatacgcgcggcacgctggccaagtacgccaagacggtcagctcggcatcgaaaggggcggtcaccgatctgcccgaagcgctggacgattga

SEQ ID NO: 188 - protein, 570 aa, Chromohalobacter salexigens
MSQQDSPANADHRRRHSSIVVDGPGKAASRAMLRAVGFTDEDFKKPQVGIASTWSRVTPCNSHINVLADAASDGADAAGGKGVVFNTITISDGIANGTEGMKYSMASREIIADSIEAVSGCEGFDGVVAIGGCDKNMPGCMIGLARLNRPSIFVYGGTIQPGAGHTDLVSVFEAMGAYSQGNKSLIEVKQIEEVAIPGPGSCGGMYTANTMASAIEAMGMSLPNSSAQDAVSQSKKDDSRAAGEAVLKLLELDIKPSDIMTRKAFENAITVVIALGGSTNAVLHLIAMANTIGVELSLDDFTEIGKRVPVLADLRPSGHYLMSELVAIGGIQPMMKILLDAGLLHGDCLTVTGKTLAENLADVTPYPTGQEIIKPLEAPIKSSSHLRILYGNLAPEGAVAKITGKEGTRFTGRARVFNSEEEAQARINDLTVAAGDVVVIRYEGPKGGPGMREMLTPTSAIMGRGLGDKVALITDGRFSGGSHGFVVGHITPEAFVGGPIGLVEDGDEITIDAENDIMTLHIDDAEMARRRAAWKRPAPRYTRGTLAKYAKTVSSASKGAVTDLPEALDD

SEQ ID NO: 189 - DNA, 1677 bp, Marinobacter algicola
atgacagaagacaaacgccgccgttattccgcgcccgtggtcgatggcctgggcaagtcggcaagccgcgccatgttgcgggccgtggggtttaccgatgaagatttccgcaaaccccagatcggtattgcctcgacctggagcaacctgacgccctgcaatatgcacatcaaccaactggcggaggaatcggccgcgggtgccgacgaggccgggggcaagagcctgacgttcaataccatcaccgtttccgacggcatcgccaacggcacggagggtatgaagtactccctggtgtcgcgggaagtcattgccgactccattgaaaccgtggctggttgtgaaggttttgatggcctggttgccattggcggctgcgacaagaacatgcccggctgcatgatgggcctggcgcgcctgaaccggccgtcggtatttgtctatggcggcaccatcatgcccggcgagaatcacaccgacatcatctcagtatttgaggcggtgggtgcccatgcccggggtgacctggacctgattgaggtcaaacagatcgaggaaaccgcgattccggggccaggctcctgcggcggcatgtacaccgccaacactatggcctcggcgattgaagccatgggcatgagcctgccgggcagttccgcccagaacgctgtttccgagaccaaggcggccgactgcagggcggcgggcgcggccgtcctcaacctgctggagaaagatctcaagccatcggacatcatgacccgggaggcgttcgagaatgctatcaccgtggtaattgccctgggtggctccaccaacgcggtgctgcacctgattgccatggccagcaccgttggcgttgacttgacgctggacgacttcgtggaaatcggcaaacgggttcccgtattggcagatctgcgccccagcggtcactacatgatgtcggaactggtggcgatcggcggcattcagccgttgatgaagatgctgctcgaccgtggcatgctccatggcaactgcatgaccgtcaccgggcagacactggcggacaacctgaaagacgtggctccgtacccggcaagccaggacatcattcatgcctttgatgaccccatcaaggcggatagccatctgcgtatcctttacggcaacctggcgcctactggtgcggtggccaagatcactggtaaggagggtacccatttcaccggccgtgcacgggtgttccagtccgaggaagaggcccaggagcggatcatggacggcaccgttgtggccggagacgtgttggtgatccggtttgaaggccccaaaggtgggccgggcatgcgggagatgctaacgccgacttctgccatcatgggtaaagggctgggcagcgatgtggcgctgattaccgacgggcgtttttccggtggcagccacggtttcgtggttggtcatattacgccggaggccgcagaaggtgggccgattgcgctggtggaaactggcgacaccatcaccattgatgcagtggccaatcgcattgagctggatgtttcggagcaggaaatggagcgccgccgacaggcatggaccgcaccggctccccgatttacccgcggggtgctggccaaatacgcgcgcaccgtgagttccgcttcggaaggcgcagtgacagacaagccgtga

SEQ ID NO: 190 - protein, 558 aa, Marinobacter algicola
MTEDKRRRYSAPVVDGLGKSASRAMLRAVGFTDEDFRKPQIGIASTWSNLTPCNMHINQLAEESAAGADEAGGKSLTFNTITVSDGIANGTEGMKYSLVSREVIADSIETVAGCEGFDGLVAIGGCDKNMPGCMMGLARLNRPSVFVYGGTIMPGENHTDIISVFEAVGAHARGDLDLIEVKQIEETAIPGPGSCGGMYTANTMASAIEAMGMSLPGSSAQNAVSETKAADCRAAGAAVLNLLEKDLKPSDIMTREAFENAITVVIALGGSTNAVLHLIAMASTVGVDLTLDDFVEIGKRVPVLADLRPSGHYMMSELVAIGGIQPLMKMLLDRGMLHGNCMTVTGQTLADNLKDVAPYPASQDIIHAFDDPIKADSHLRILYGNLAPTGAVAKITGKEGTHFTGRARVFQSEEEAQERIMDGTVVAGDVLVIRFEGPKGGPGMREMLTPTSAIMGKGLGSDVALITDGRFSGGSHGFVVGHITPEAAEGGPIALVETGDTITIDAVANRIELDVSEQEMERRRQAWTAPAPRFTRGVLAKYARTVSSASEGAVTDKP

SEQ ID NO: 191 - DNA, 1677 bp, Marinobacter aquaeolei
atgacaaccgataaacgacgccgacactcggcaccggtggtagacggtatcaataaatccgccagccgggccatgctccgggcggtaggttttaccgacgaggatttccgcaaaccccagattggcattgcctccacctggagcaaccttacgccctgcaacatgcacattgacggcctggcccgggaggccgccaagggtgccgacggagccgggggcaagagcctgatcttcaacaccatcactatctctgatggcatcgccaacggcaccgagggcatgaaatattccctggtgtcgcgcgaggtgattgccgattccattgagaccgtggccggttgtgagggcttcgacggactggtcgccatcggtggctgcgacaagaacatgcccggctgcatgatgggcctggcccggctgaaccggccctcggtcttcgtttacggcggcaccatcatgcccggcgagaaccataccgacatcatctccgtgtttgaggcggtgggcgcccatgcccgcggtaacatggagctgatcgaagtcaaacagatcgaggaaaccgcgattcccgggccaggctcctgtggcggcatgtacaccgccaacaccatggcctccgccattgaggccatgggtatgagcctgccaggcagctcggcccagaacgccatctccgacagcaaactggcggattgcgaagccgcaggcgccgcggtgctgaaactgctcgaagccgatatcaagccctccgacatcatgacccgggaagcgttcgagaacgccatcaccgtggtggtcgcgctgggcggttccaccaacgccgtgctgcaccttctgggtatggccagtaccgtgggagtggagctgtcactggacgatttcgtacgcatcggcaaacaggtaccagtcctggcggaccttcgcccctccggccactacatgatgtccgagctggtggccattggtggcattcaaccgctaatgaagatgctgctcgaccgggggctgctgcatggagactgcctcacggtaaccggcaaaaccctggcagagaatctcgagaccgtggtgccctaccccgaagaccagcagatcatccacgccttcgacaacccgatcaaagccgacagtcatctgcgtattctctatggcaacctggctccggaaggctcggtggcgaaaatcaccggtaaggaaggcacgcatttttccggtcgagcccgagtgtttcactctgaagaggaagcccaggagcgaatcctggatggcaccgtggtcgctggcgacgtgctggtgatccgatacgaaggcccgaagggcgggcctggcatgcgggaaatgctcagccccacctcggcgattatgggcaaaggtcttggcagtgatgtggctctgattacagacggccgcttctccggtggcagtcatggttttgtggttggccatatcacaccagaggccgccgtgggcgggccgattgcgctggtagaagacggcgacaccattaccattgatgccgtgagcaactcgattgtgctggaaatctctgacgaggaaatggaaaaacggcgcaaagcctggacgccgccggaacccagatttacccggggcgtgctggccaaatatgcccgtgtggtgagctctgcatctacgggggccgttaccgacctgccctag

SEQ ID NO: 192 - protein, 558 aa, Marinobacter aquaeolei
MTTDKRRRHSAPVVDGINKSASRAMLRAVGFTDEDFRKPQIGIASTWSNLTPCNMHIDGLAREAAKGADGAGGKSLIFNTITISDGIANGTEGMKYSLVSREVIADSIETVAGCEGFDGLVAIGGCDKNMPGCMMGLARLNRPSVFVYGGTIMPGENHTDIISVFEAVGAHARGNMELIEVKQIEETAIPGPGSCGGMYTANTMASAIEAMGMSLPGSSAQNAISDSKLADCEAAGAAVLKLLEADIKPSDIMTREAFENAITVVVALGGSTNAVLHLLGMASTVGVELSLDDFVRIGKQVPVLADLRPSGHYMMSELVAIGGIQPLMKMLLDRGLLHGDCLTVTGKTLAENLETVVPYPEDQQIIHAFDNPIKADSHLRILYGNLAPEGSVAKITGKEGTHFSGRARVFHSEEEAQERILDGTVVAGDVLVIRYEGPKGGPGMREMLSPTSAIMGKGLGSDVALITDGRFSGGSHGFVVGHITPEAAVGGPIALVEDGDTITIDAVSNSIVLEISDEEMEKRRKAWTPPEPRFTRGVLAKYARVVSSASTGAVTDLP

SEQ ID NO: 193 - DNA, 1692 bp, Marinobacter sp.
atgagtgataccccccaagaccctcgccgccgttattccgctccggttgtggacggtgtggctaaatccgccagtcgttccatgctgagggccgtcggttttaacgacgaagatttcagcaaaccgcagatcggcattgcttccacctggagtatggttaccccctgtaatagccacattaacgagctggccgacattgcttgtaagggtgcggaccaggccggtggtaaaggcgttatttttaacaccattacgatttctgacggcattgccaacggcaccgaaggaatgaagtattccctggtgtcgcgggaagtcatcgcagattccattgaaaccgtggccggttgcgagggttttgacggcctggttgccattggcggctgtgacaaaaacatgcccggctgcatcatgggcctggcgcggcttaaccggcccagcgtgtttgtttatggcggtactattttgcctggtgaaggtcacaccgacattatttcagtgtttgaagcggtgggcgcccatgccaaaggcgaactgtcgttgattgaagtgaagcatattgaagaaaccgccattcccggccccggttcctgtggcggcatgtacaccgccaataccatggcctcggccatagaagcactgggtatgagcctgcccggcagctcggcgcagaatgcggtgtcgaatgacaaaaaagccgattgcgaagccgccggtgccgcggtcatgaatctgttggatcgagatatcaaaccttccgacattatgactcagcacgcctttgagaacgccatcactgtgatcatcaccttgggtggttccaccaacgccgtactgcacctgattggtatggccaacacggcgggtgtagagctaaccctggatgacttcactcgcattggtaaaaaggttccattgttggcggatctgcgccctagcggccattacatgatgagcgaattggtggccattggcggcatccagccactcatgaaaatgctgctagacgccggcatgctccacggcgattgcctgacagtaaccggcaaaactctggccgaaaacctggccacggtagaaccttatgccgatggccagaaaatcattatgcctctggaccagcccattaaagcggaaagccacctgcgcattctgtttggtaatctggcgccggaaggctccgtggcaaaaattaccggtaaggaaggcacccactttaaaggtcgggcgcgggtgtttggttcggaagaagaagcccaagcacgaattctggacggcactgtggtggctggcgatgtgctggttatccgctatgaaggcccacgcggcggccccggcatgcgcgaaatgctgtcacccacctcggcgattatgggccgtgggctgggcagcgatgtggctttgataactgacggtcgtttctccggtggtagccacggcttcgtcgtaggccacattacgccggaagcgtttgatggcggccctattgccttggtgcaagacggcgacgaaatcgtgattgatgccgtggccgacactattgagctaaatgtcagtgacgacgaactgcagagccgtcgcgacgcctggcagcaaccgcaaccgcgttacacccgcggtgtgttagccaagtatgcgcgcaccgtgagttcggcgtcgaccggtgcagtgaccgacctgcccgagccttga

SEQ ID NO: 194 - protein, 563 aa, Marinobacter sp.
MSDTPQDPRRRYSAPVVDGVAKSASRSMLRAVGFNDEDFSKPQIGIASTWSMVTPCNSHINELADIACKGADQAGGKGVIFNTITISDGIANGTEGMKYSLVSREVIADSIETVAGCEGFDGLVAIGGCDKNMPGCIMGLARLNRPSVFVYGGTILPGEGHTDIISVFEAVGAHAKGELSLIEVKHIEETAIPGPGSCGGMYTANTMASAIEALGMSLPGSSAQNAVSNDKKADCEAAGAAVMNLLDRDIKPSDIMTQHAFENAITVIITLGGSTNAVLHLIGMANTAGVELTLDDFTRIGKKVPLLADLRPSGHYMMSELVAIGGIQPLMKMLLDAGMLHGDCLTVTGKTLAENLATVEPYADGQKIIMPLDQPIKAESHLRILFGNLAPEGSVAKITGKEGTHFKGRARVFGSEEEAQARILDGTVVAGDVLVIRYEGPRGGPGMREMLSPTSAIMGRGLGSDVALITDGRFSGGSHGFVVGHITPEAFDGGPIALVQDGDEIVIDAVADTIELNVSDDELQSRRDAWQQPQPRYTRGVLAKYARTVSSASTGAVTDLPEP

SEQ ID NO: 195 - DNA, 1680 bp, Pseudoalteromonas haloplanktis
atgacttctgaaaaaccacgtaaatattcacaaaaaattgtagatggtagcgctcaggctcctagtcgttctatgttacgagcggtaggttttaatgatgacgattttaaaaagtctcaagttggtattgcctctacatggtctatggtaacgccgtgcaatatgcacattaatacacttgccgaagaagtaggtaaaggcgtagatagcgccggtgcgaaaagcgttatatataataccattaccgtatccgatggtatttctatgggcaccgaagggatgaaatattctttagtatcacgcgaagtaatttgcgactcaatagaagcggtatcggcgggtatgggccacgacggtattattgctattggcggttgtgataaaaatatgccgggttgtttaatgggtttagcacgtttaaaccgcccctctatatttgtgtacggcggtacaattttacccggtgaaaatcataccgatatagtctcggtatttgaagcggtgggcagctacgcggcaggcgatattccaattacgcaattagaacatattgaaaaaacagccataccaggggctggttcgtgtggtggtatgtacacggcaaatacgttagcctcagcaattgaagctttaggcatgagtatgccaaatagttctgcgcaaaatgctatttcacaaaacaaaaaacaagactgtattgatgcgggtaaagcgattgtttatttgctagagcatgacattaaaccttccgatattatgaccaaaaaagcgtttgaaaatgcaattacgctgatcattaccttaggcggctcaaccaatgcggtgctgcatttaatcgctatggctgatgcggtaggcgttgaagtaacattggatgactttgtgcgtattggcgataaaacaccagtaattgccgacttgcgtcccagcggtcaatatttaatgtcggagttgattgaaattggtggcattcaaccactgatgaagcgtttattagatgccggtatgctgcacggtgactgtatgacagtgacaggcaaaaccatggccgaaaatttagccgatgtagcagattacccagcagggcaaaatattattttaccttttgataagccgattaaaaaagacagccatttagttatattagctggtaatttagcgccagaaggggcagtgtcaaaaattacgggtaaagagggtttacgctttaccggcaacgcaaaagtatatgactcagaagagcaaggttttgccgctattatagatgggcaagtagtagccggagacgttgtagtaattcgctatgaaggccctaaaggtggcccaggtatgcgtgaaatgctaagccccacttcagctattatgggtaaaggtttaggtaacgatgtggcgcttattaccgatggtcgtttttcaggtggtagtaggggttttgttgtggggcacgttacaccagaagcttacgaaggcggcgccattgcactagtagaaaatggtgacagcattactattgacgcgcaaagccgtgaaatgactcttaatattactgatgaagaaatggccagtaggaaacaacgttggcaacaacctgcgccaaaatacacccgcggattactagcaaaatatgccagaacagtaagttcagcttctaccggagccgtgaccgataagccaagttaa

SEQ ID NO: 196 - protein, 559 aa, Pseudoalteromonas haloplanktis
MTSEKPRKYSQKIVDGSAQAPSRSMLRAVGFNDDDFKKSQVGIASTWSMVTPCNMHINTLAEEVGKGVDSAGAKSVIYNTITVSDGISMGTEGMKYSLVSREVICDSIEAVSAGMGHDGIIAIGGCDKNMPGCLMGLARLNRPSIFVYGGTILPGENHTDIVSVFEAVGSYAAGDIPITQLEHIEKTAIPGAGSCGGMYTANTLASAIEALGMSMPNSSAQNAISQNKKQDCIDAGKAIVYLLEHDIKPSDIMTKKAFENAITLIITLGGSTNAVLHLIAMADAVGVEVTLDDFVRIGDKTPVIADLRPSGQYLMSELIEIGGIQPLMKRLLDAGMLHGDCMTVTGKTMAENLADVADYPAGQNIILPFDKPIKKDSHLVILAGNLAPEGAVSKITGKEGLRFTGNAKVYDSEEQGFAAIIDGQVVAGDVVVIRYEGPKGGPGMREMLSPTSAIMGKGLGNDVALITDGRFSGGSRGFVVGHVTPEAYEGGAIALVENGDSITIDAQSREMTLNITDEEMASRKQRWQQPAPKYTRGLLAKYARTVSSASTGAVTDKPS

SEQ ID NO: 197 - DNA, 1686 bp, Acinetobacter sp.
atgagtaaagacaatatacgccagtattcggcaccagtttatgacggtattgaaaatgcccctgcacgttcgatgatgcgtgctgtgggctttcaagataaagattttaatcgtccatttattggcattgcttcaacatgggccaatgtcacgccgtgcaacatgcacattgatggactggcacgagaagctgaacatggggtgaatcaggccagcggtaagggaattatttttaacactattaccatttctgacggtatttcaaacggtaccgaaggcatgaagtattctttggtttctcgtgaaattattgcagactctattgaggcggtcattggttgtcagggttacgatggtgtaattgccattggtggctgcgacaaaaacatgcctggctgtattatggggctggcacgtttgaaccgtccaggcttgtttatttatggcggcaccattcaaccaggtgaaggacataccgacatgatttcggtgtttgaagcggtgggacagtacgccaaaggagaaatcaatgccattcaggtcaagcagattgaagaagtcgctttaccaggaccaggttcttgcgggggaatgtataccgccaataccatggcttctgctattgaagcactgggaatgagtttaccaggttcttctgcacaggatgccatttctgaagaaaagcgtcaggactgtcatcgtgcgggcgaggcggtgatgaacctgcttcggctggatattcgtccacgcgatattatgaccaaagcggcatttgagaatgccattaaggtcgtcattgctttgggcggttcaaccaatgccgtattgcatttgattgcaatggcacatacggctgaggtaaagcttgatctggatgattttgtacgaattggtcaggaaacacctgtggtggcagatttacgaccatcgggtaagtatctcatgtccgaactgatcaagattggtgggattcagccgttgatgaagcgaatgctggaacgcggcatgctggatggtagttgtctgactgtaactggtaagacccttgcagagaatttggccgaggttgaggattatcctgccgatcaacaaattatcttgccatttgagcaacctgttaagaaagactcccatctagtgattcttaagggtaatttgtccccgacaggtgccgttgccaaaattacgggcaaagaaggtttatattttgaagggccagcccgcgtttttgaaggcgaagaaggcgccatgcgtggcattctagacggagaagtacaagagggcgaagttgtcgtcattcgtggtgaaggacccaaaggtggaccaggcatgcgcgaaatgctgaaaccaacgtctgcaattattggtaaaggactgggacaatcggtggcgctgattaccgatgggcggttttcgggcggcagtcatggctttgtcattggccatgtgaccccagaagcttacgaaggtgggcctattggtttggttgaaaatggtgataaaatttcaatcaatgctgaaacgcgtgaaatcaccttacatatttctaacgaagaaatgagcttacgtcgtgcaaaatggcagaaaccagaaccaaaatataaatctggtgctttggcaaaatttgcaaaacttgcagcaggtgcggacaaaggcgcagttactgatttaaatcttgatgtgtaa

SEQ ID NO: 198 - protein, 561 aa, Acinetobacter sp.
MSKDNIRQYSAPVYDGIENAPARSMMRAVGFQDKDFNRPFIGIASTWANVTPCNMHIDGLAREAEHGVNQASGKGIIFNTITISDGISNGTEGMKYSLVSREIIADSIEAVIGCQGYDGVIAIGGCDKNMPGCIMGLARLNRPGLFIYGGTIQPGEGHTDMISVFEAVGQYAKGEINAIQVKQIEEVALPGPGSCGGMYTANTMASAIEALGMSLPGSSAQDAISEEKRQDCHRAGEAVMNLLRLDIRPRDIMTKAAFENAIKVVIALGGSTNAVLHLIAMAHTAEVKLDLDDFVRIGQETPVVADLRPSGKYLMSELIKIGGIQPLMKRMLERGMLDGSCLTVTGKTLAENLAEVEDYPADQQIILPFEQPVKKDSHLVILKGNLSPTGAVAKITGKEGLYFEGPARVFEGEEGAMRGILDGEVQEGEVVVIRGEGPKGGPGMREMLKPTSAIIGKGLGQSVALITDGRFSGGSHGFVIGHVTPEAYEGGPIGLVENGDKISINAETREITLHISNEEMSLRRAKWQKPEPKYKSGALAKFAKLAAGADKGAVTDLNLDV

SEQ ID NO: 199 - DNA, 1737 bp, Opitutaceae bacterium
atgaagccgacgaccgccaagaccaagcctgccacagccgccaagaccgccaacgccacgcgccagttctcctccatcgtgcacgacggagccgaccgcgcccccaatcgctccatgctccgcgccgtcggattcggcgatgcggatttcaagaaaaccgtcgtcggcgtcgcctccacctggtcgatgctcaccccgtgcaacatgcacatcaacaagctcgccgaatacgccgagcagggcgccaacgaagccggcggcaagggcatcatcttcggcaccatcaccatcgccgacggcatcagcatgggaacgcccggcatgcgctactcgctcgtgtcccgcgaagtcattgccgactccatcgaaaccgtggttggcggcgaaggttttgacggccttgtcgccatcggcggctgcgacaaaaacatgcccggctgcgttatggccatggcccgtctcaaccgccccagcgttttcgtttacggcggcaccattcttcccggcatccacccggaaaccaaaaaggacctcgacatcgtttccgtcttcgaagccgtcggccagcacgccgcgggcaagatcaacgacgctgcgctcaaggttgttgaggaatgctccatccccggtcccggttcctgcggcggtatgtataccgccaatacaatggccaacgccatcgaagccctcggcctctcgctgcccaattcctccgcgcaaatcgccatctccaaggaaaaacaagaagactgtcgccgcgccggagccgctgtcgttgaactcgcaaaaaaggggattcgtccgcgtgacattttaaccaaaaaagcctttgaaaacgccatcactgtagtgatcgccctcggtggctcaaccaatgccgtcctgcacctcctcgccatcgcgcacactgccggcgtgaagctcaccatcgacgacttcacccgcatcggcaaacgcgtgcccgtgctcgccgatctcaaaccttcgggcaaatacggcatggtgcatctctctcgcatcggcggcgtgcctccgctcatgaagaccttgctcgaccgcggtctcatccacggcgactgcctcaccgtcaccggcaagaccgtggcggaaaacctcaaggacgtgcagccgtatccagaaaatcaggacgtgatccgtccctttgaccaaccgatcaagcccgacagccacctgcgcattctctacggcaacctcgccgccgagggttccgtggccaagatctccggcaaggaaggcttaaagttttccggcaaagccatcgtgttcgagggagaggaggccgcgttgtctgccatcctcgacggacgcgtgaagtccggccacgtcgtcgtgatccgcaatgagggtcccgtgggcggccccggcatgagggagatgctcgcccccaccagcgccatcatgggcaagggactcggcaaggaagtcgcgctcatcaccgacggacgtttttcgggcggttcgcacggatttgtggtcggccacatcacacccgaggcggcgattggcggcaccatcggcgtcgtgaaaaacggcgacccgatcaccatcgacgccgtaaaaaaccagatcacgctcgacattcccgcgaaggaaatcgccgcgcgcaaaaagacctggaagccacgcaagccctacaccaatcgcggtgtgttggcgaagtatgccaaactcgtcagcaccgccagcgaaggcgcggtgacggacaagtatttgtaa

SEQ ID NO: 200 - protein, 578 aa, Opitutaceae bacterium
MKPTTAKTKPATAAKTANATRQFSSIVHDGADRAPNRSMLRAVGFGDADFKKTVVGVASTWSMLTPCNMHINKLAEYAEQGANEAGGKGIIFGTITIADGISMGTPGMRYSLVSREVIADSIETVVGGEGFDGLVAIGGCDKNMPGCVMAMARLNRPSVFVYGGTILPGIHPETKKDLDIVSVFEAVGQHAAGKINDAALKVVEECSIPGPGSCGGMYTANTMANAIEALGLSLPNSSAQIAISKEKQEDCRRAGAAVVELAKKGIRPRDILTKKAFENAITVVIALGGSTNAVLHLLAIAHTAGVKLTIDDFTRIGKRVPVLADLKPSGKYGMVHLSRIGGVPPLMKTLLDRGLIHGDCLTVTGKTVAENLKDVQPYPENQDVIRPFDQPIKPDSHLRILYGNLAAEGSVAKISGKEGLKFSGKAIVFEGEEAALSAILDGRVKSGHVVVIRNEGPVGGPGMREMLAPTSAIMGKGLGKEVALITDGRFSGGSHGFVVGHITPEAAIGGTIGVVKNGDPITIDAVKNQITLDIPAKEIAARKKTWKPRKPYTNRGVLAKYAKLVSTASEGAVTDKYL

SEQ ID NO: 201 - DNA, 1683 bp, Flavobacterium sp.
atggaattaaataaatacagtaaaactgtaactcaagacccaacattgcctgcggctcaagcaatgctgcacgcaataggtttaaccgatgaagatctcaagaaaccattaattggtatcgcaagtactggttatgaggggaatccttgtaatatgcaccttaatgatttggcaacctacgtcaagaaaggtgcgtctaatgcagatttagtcggacttattttcaatacgatcggtgtaagtgatggtatttctaacggaactccgggaatgcgtttctcgctgccgtcacgtgatatcatcgctgattctatggaaaccgtggttcaagcaatgagttatgacggtctggttacagttgtgggctgtgataaaaatatgccgggggcattaattgcgcaattgcgattaaatcgcccgtcaattttagtttatggaggaacgatcgcttccggatgccataacggaaaaaaactagatatcatttctgcttttgaggcttatggtcaaaaagttgcaggaactattgatgataatgagtttaaagaagtagtacacaaagcgtgtccgggtgccggtgcttgtggtggtatgtatactgcaaatactatggcttctgctattgaagctttaggaatgtcattgccttttaactcatcgaaccctgcagttactgatgctaatattaaagagcaggaatgtattaaagcaggtgaggctttaaaatatttattagagcaggatattaaaccttcagatattgtaacaaaagagtcgctcgagaatgcgattcgcttggtgactgttttgggaggttctaccaacgcagtattgcactttttagcaatagctaaagcagctcaggtagattttacgctagaagattttcagcgcctgagtgataatacaccgttgttagcagatcttaaaccttcaggtaaatattctatggaagatttacacggtgttggcggaattccgggagtattaaaatatatgcttgataacggtatgcttcacggggattgtttaaccgttaccggaaaaactttagctgaaaacctaaaagatgttcccaatcttatagatggtcaggatattattagaccgttgaataagccaattaaagatagtggccatatccgtatactattcgggaacttggctactgaaggagctgtagcaaagattaccggtaaggaagggctttcgtttacaggaactgccaatgtattcaacagcgaattagaggtaaacgaaggaattaaatcaggaaaagttaaaaaaggtgacgtagtgatcattcgctatgaaggacctaaaggtggtcccggaatgccagaaatgcttaagcctacctcttcaattatgggagccggtttaggtaaagacgttgctttgattactgacggaagattctctggtggatcgcacggatttgtggtggggcacgtttctcccgaagcacaagtgggtggaaatatcgcacttgtagaaaatggagatgtcatttctattgatgccgtaaagaataccatcaacatcgatattaccgatgaagaattggcaaaacgaagagaaaaatggacagctccggaacttagattccaacgcggagcgttatataaatatgcgaaaacagtctcgtcagcttctaaaggttgtgtgacagacgaaatgtag

SEQ ID NO: 202 - protein, 560 aa, Flavobacterium sp.
MELNKYSKTVTQDPTLPAAQAMLHAIGLTDEDLKKPLIGIASTGYEGNPCNMHLNDLATYVKKGASNADLVGLIFNTIGVSDGISNGTPGMRFSLPSRDIIADSMETVVQAMSYDGLVTVVGCDKNMPGALIAQLRLNRPSILVYGGTIASGCHNGKKLDIISAFEAYGQKVAGTIDDNEFKEVVHKACPGAGACGGMYTANTMASAIEALGMSLPFNSSNPAVTDANIKEQECIKAGEALKYLLEQDIKPSDIVTKESLENAIRLVTVLGGSTNAVLHFLAIAKAAQVDFTLEDFQRLSDNTPLLADLKPSGKYSMEDLHGVGGIPGVLKYMLDNGMLHGDCLTVTGKTLAENLKDVPNLIDGQDIIRPLNKPIKDSGHIRILFGNLATEGAVAKITGKEGLSFTGTANVFNSELEVNEGIKSGKVKKGDVVIIRYEGPKGGPGMPEMLKPTSSIMGAGLGKDVALITDGRFSGGSHGFVVGHVSPEAQVGGNIALVENGDVISIDAVKNTINIDITDEELAKRREKWTAPELRFQRGALYKYAKTVSSASKGCVTDEM

SEQ ID NO: 203 - DNA, 1680 bp, Cellulophaga sp.
ttgaaagaacttaataaatatagtaaagcggtaactcaagatcctacgcagccagctgctcaggcaatgttgcacgctataggacttacagatgaagattttaaaaagccacttgtaggtattgcaagtacaggttatgagggtaatccttgtaatatgcacttaaataaccttgcactagatattaaaaaaggagtacaaacttctgatctggtaggtcttatttataataccataggtgtaagtgacggtatctcaatgggtactcctggtatgcggtactcactacctagtagagatattattgcagactcaatggagactgtagtacaagctatgtcttatgatgcactggttacagtggtaggttgtgataaaaatatgccgggtgctcttatggcacagcttaggctagatagaccatctatactcgtctatgggggaactatagcaccaggatttcacgaagataaaaagctagatgtagtgtctgcttttgaagcttggggagaaaaagtagctggtagtattacagagcaagagtttaaaacggtggtaaaaaaagcctgtccaggtgctggtgcgtgtggtggtatgtatactgcaaacacgatggcaagcgcgattgaggcactagggatgagcttaccctatacaagttctaaccctgcagtgtcacctaataaaactgcggagtgtgctagagtaggagctgctttaagaaacctaatagaaaaagacataaaaccctcagacattgttactcgcaagtcactagagaatgcggtgagacttgtaaccgtacttggaggatctactaatgctgtgctgcactttctcgctatagcaaaggctgcacaagtatcatttacactagaagattttcaaaaaataagcgacaccacaccttttctagcagatcttaaaccatcaggaaaataccttatggaagatttacataatgtaggaggagtgccgggcgtattaaagtatatgctagagcaaggtatgttgcacggtgactgtatgaccgtaactggtaaaactattgcagagaatctagcagttgtagaccatcttcaggcacatcaagatgttattcattcggttgagaatcctattaaagagacgggacacattcgtattctttatggaaatattgcaagtgaaggatctgtggcaaaaattacaggtaaagagggattacattttcgcggaagcgcaagagtttacaacggtgagtatgctgcaaacgcgggtataggtgcaggagaggtgaaaaagggtgatgtagtagttatacgctacgaagggccacaaggaggaccgggtatgccagaaatgctcaaacctacagcggctattatgggtgctggcttaggtaaggatgtggcacttattacagatggacgtttttctggaggtacacacggctttgttgtggggcacattactccagaggctcaagtaggtggtgggattgcgcttatagaaaatggagataccattgtgattaacgctgagactaacacaattaatgttgagataagtgagagcgaactagaagcacgtaaaaagaactgggtagctccagagcttaaagtaaaacgtggctcactttataaatatgctcgtatggtctcatctgcgagtgagggatgcgtgacagacgagttctag

SEQ ID NO: 204 - protein, 559 aa, Cellulophaga sp.
MKELNKYSKAVTQDPTQPAAQAMLHAIGLTDEDFKKPLVGIASTGYEGNPCNMHLNNLALDIKKGVQTSDLVGLIYNTIGVSDGISMGTPGMRYSLPSRDIIADSMETVVQAMSYDALVTVVGCDKNMPGALMAQLRLDRPSILVYGGTIAPGFHEDKKLDVVSAFEAWGEKVAGSITEQEFKTVVKKACPGAGACGGMYTANTMASAIEALGMSLPYTSSNPAVSPNKTAECARVGAALRNLIEKDIKPSDIVTRKSLENAVRLVTVLGGSTNAVLHFLAIAKAAQVSFTLEDFQKISDTTPFLADLKPSGKYLMEDLHNVGGVPGVLKYMLEQGMLHGDCMTVTGKTIAENLAVVDHLQAHQDVIHSVENPIKETGHIRILYGNIASEGSVAKITGKEGLHFRGSARVYNGEYAANAGIGAGEVKKGDVVVIRYEGPQGGPGMPEMLKPTAAIMGAGLGKDVALITDGRFSGGTHGFVVGHITPEAQVGGGIALIENGDTIVINAETNTINVEISESELEARKKNWVAPELKVKRGSLYKYARMVSSASEGCVTDEF

SEQ ID NO: 205 - DNA, 1680 bp, Kordia algicida
atgaacaatctcaataaatacagcaaaacagtcacacaagatcctacgcaacctgcggcacaagccatgttgcatgccattggattaacgaaagaagactttttcaaacccatcatcggaattgcaagtacaggttacgaaggaaatccgtgcaacatgcacctaaacgatctggcaaaactggcaaaacaaggaacaaaaaatgaggaggttgtcggacttattttcaatacaattggcgtaagtgatggaatctccatgggaacaccaggaatgcgttattcattgccttcacgcgatatcattgccgattctatggaaacggtagtgcaagcaatgagttatgacggattaatcacggttgttggttgtgacaaaaacatgccaggcgcactaatggcaatgattcgcctaaatcgcccaagtatcttagtctatggcggaaccattgattctggttgtcacaacggaaaaaaactcgatgttgtttctgcttttgaagcttggggaagcaaagttgcaggaactatggacgaaacagaataccaaaacattgttgaaaaagcgtgtccaggtgctggtgcttgtggcggaatgtacaccgcaaacaccatggcttctgctatagaagcattgggaatgacattaccattcaattcatcaaatcctgcgttgagcgatgctaaaaaacaagaatcggttgcggcgggcgaagcaatgcgtgttttgttagaaaaagatatcaaaccatcagacattattactcgaaaatctttggaaaatgcagttcgtttagtaacaattttgggcggatcaaccaatgcagtattacacttcttagcaattgccagagctgcacaaattgatttcacactcaaagactttcaagaaataagcgatgaaacgccgtttttggcagacttaaaacctagtggaaaatacttaatggaagacgtacacgctgtcggcggaattcctgcggtattaaaatatttactcaaaaaaggattgcttcatggcgattgtttaacggttacgggaaaaacaatggcagaaaatttattagatgtcgatgacttaacagaaggtcaagatgtcatcaaacctgtggaaaatccaataaaaatatcaggacacttacgcatgctttatggaaacctagcaagtgaaggaagcgtggcaaaaatcacaggaaaagaaggtttaaaattctctggaaaagcaaaagtatttgaaggtgaatacgaagccaatgacggaattcgtgatggaaaagtgcaaaaaggagacgtcgtcgtcattcggtatgaaggaccaaaaggcggaccaggaatgccagaaatgctaaagccaacagcagcaatcatgggtgcaggtttaggaaaagatgttgcattaattactgatggacgcttttctggaggaacacacggttttgtcgtcggacacatcacgccagaagcacaagaaggcggaacacttgctttagtaaaagatggcgatatcattaccattgatgcagaaacgaatacgatacaattagaagtttcaaacgaagaacttcaagaacgtaaaaaacaatggaaagcacccgaactcaaatttgaacgcggtgtattatacaaatatgcaaaaacagtttcatctgcatccaaaggttgcgtaactgatgaattttag

SEQ ID NO: 206 - protein, 559 aa, Kordia algicida
MNNLNKYSKTVTQDPTQPAAQAMLHAIGLTKEDFFKPIIGIASTGYEGNPCNMHLNDLAKLAKQGTKNEEVVGLIFNTIGVSDGISMGTPGMRYSLPSRDIIADSMETVVQAMSYDGLITVVGCDKNMPGALMAMIRLNRPSILVYGGTIDSGCHNGKKLDVVSAFEAWGSKVAGTMDETEYQNIVEKACPGAGACGGMYTANTMASAIEALGMTLPFNSSNPALSDAKKQESVAAGEAMRVLLEKDIKPSDIITRKSLENAVRLVTILGGSTNAVLHFLAIARAAQIDFTLKDFQEISDETPFLADLKPSGKYLMEDVHAVGGIPAVLKYLLKKGLLHGDCLTVTGKTMAENLLDVDDLTEGQDVIKPVENPIKISGHLRMLYGNLASEGSVAKITGKEGLKFSGKAKVFEGEYEANDGIRDGKVQKGDVVVIRYEGPKGGPGMPEMLKPTAAIMGAGLGKDVALITDGRFSGGTHGFVVGHITPEAQEGGTLALVKDGDIITIDAETNTIQLEVSNEELQERKKQWKAPELKFERGVLYKYAKTVSSASKGCVTDEF

SEQ ID NO: 207 - DNA, 1680 bp, Flavobacteriales bacterium
atgagtcaattaaacaaatacagtaaaactgttacacaagatccaacgcagccagctgctcaagcaatgcttcatgctattggattaactaaagaagatttttataaacctattgtaggaattgcaagtacaggttacgaaggtaacccttgtaatatgcacctcaatgacctagcgaaattggtcaaagaaggcacaaagaatgaagatgtcgtcggcttaattttcaacacaattggtgtaagtgatggcatttctatgggaacaccaggaatgcgttactcattaccttcaagagatattattgcagattctatggaaactgtagtacaagccatgagttatgatggtttagtcactgtagttggttgcgacaagaatatgcctggagccttaatggctatgataagattaaatcgtccttcgattttagtttatggaggcacaattgattctggttgtcataatgggcaaaaattagatgttgtttctgcatttgaagcttggggaagcaaagttgcaggtactatgaccgaaaatgaataccaaaatatagttgaaaaagcatgtcctggagctggtgcttgtggaggtatgtacacagcaaacacaatggcttctgctattgaggctctaggtatgacattaccttttaactcttctaatccagccttaagtgatgcaaagaaagaagagtctgtaaaagctggagaagctttaagagttttactcgaaaaagatattaagccttcagatattataactagaaaatcacttgaaaatgcagtaagattagttaccatattaggtggctctacaaatgctgtattacactttttagccattgcaagagcagctcaaattgatttcacattaaaagattttcaagatataagtgataacactccattcttagcagatttaaaaccaagtggaaaatacttaatggaagatgtacatgctgtaggaggaattcctgcggtattaaaataccttcttaaaaaaggattaattcacggagattgtttaaccgttaccggaaagacaatagctgagaatttattagatgttgctgacttaaccgaaggtcaagacgtcatcaaacccatcgaagaaccaattaaaatttctggacacttaagaatgctctacggaaacctagccactgaaggtagtgttgcgaaaattactgggaaagagggcttaagttttaaagggaaagcaaaagtatttgaaagtgaatatgatgcaaacgatggcattagagatggaaaagtagaaaaaggtgatgtcgtagtcattcgatacgaaggtccaaaaggagggcctggaatgccagaaatgctaaagccaactgctgctattatgggagctggtttaggtaaagatgtagccttgattactgatggaagattctctggaggaactcacggttttgtcgttggacacatcacacctgaagcacaagaaggcggcactcttgcttttgttgaagatggagatattattacaattgatgccgaaaccaatacgatttcagtagaagtatctgaacaagaattacaaaaaagaagaaaaaattggaaagctccagatttaaaatttgaacgtggagtactttataaatatgcaaagacagtatcatcagcttcaaaaggctgtgttactgatgaattttaa

SEQ ID NO: 208 - protein, 559 aa, Flavobacteriales bacterium
MSQLNKYSKTVTQDPTQPAAQAMLHAIGLTKEDFYKPIVGIASTGYEGNPCNMHLNDLAKLVKEGTKNEDVVGLIFNTIGVSDGISMGTPGMRYSLPSRDIIADSMETVVQAMSYDGLVTVVGCDKNMPGALMAMIRLNRPSILVYGGTIDSGCHNGQKLDVVSAFEAWGSKVAGTMTENEYQNIVEKACPGAGACGGMYTANTMASAIEALGMTLPFNSSNPALSDAKKEESVKAGEALRVLLEKDIKPSDIITRKSLENAVRLVTILGGSTNAVLHFLAIARAAQIDFTLKDFQDISDNTPFLADLKPSGKYLMEDVHAVGGIPAVLKYLLKKGLIHGDCLTVTGKTIAENLLDVADLTEGQDVIKPIEEPIKISGHLRMLYGNLATEGSVAKITGKEGLSFKGKAKVFESEYDANDGIRDGKVEKGDVVVIRYEGPKGGPGMPEMLKPTAAIMGAGLGKDVALITDGRFSGGTHGFVVGHITPEAQEGGTLAFVEDGDIITIDAETNTISVEVSEQELQKRRKNWKAPDLKFERGVLYKYAKTVSSASKGCVTDEF

SEQ ID NO: 209 - DNA, 1704 bp, Psychroflexus torquis
ttgatttttgaaaatgaaacagatacaatggaactaaataagtatagcaaaaccgttactcaagatcctactcaaccagctgctcaagctatgctgcatgctataggtctaactaaagaagatttttttaagcctatcattggtattgctagtactggatacgaagggaatccttgtaatatgcatttaaacgatctcgctaaactcgctaaacaagggacagcaaatgaagatattataggtttaatatttaataccataggggtgagtgatggaatttctatgggcacaccaggaatgcgttactctctaccttctagggatatcatcgcagactccatggaaactgttgttcaagctatgagttatgatggtttaattactgtcgtaggctgcgataaaaacatgcccggtgcattaatagcgatgattcgactcgacagaccttgcattatgatttatggaggaaccatcgattctggttgtcataatggaaaaaaattggacgtggtttccgcttttgaagcttggggaagtaaagtggctggaaccatgcaagaagaagaataccaaagcattgtagaaaaagcgtgtcctggagctggtgcttgtggagggatgtatactgctaatacgatggcctcttctatagaagctttaggaatgactttaccttataattcttccaatccagcgcttagtccagaaaaaaaacaagagtctattaaagcaggtgaagctttgagagttttattggaaaaagacatcaaaccttcagatataattacaagaaaatctttagaaaatgccatacggttaattacaattttaggaggatctacaaatgctgttttacattttttagcaattgctagagccgctgaaattgatttcactttaactgattttcaaacgattagcgataatactccttttttagcagacttaaaaccgagtggtaagtaccttatggaagatttacatgaggtaggtggaattccagcagttttgaaatatttgcttaaaaaaggccttatttatggagactgcctaaccgttacaggaaaaactttagcagaaaatttacgtgatgtagaggatcttaaagaaggtcaggaggtcatcaaaccaatagaaagccctattaaaatctcaggacatctaagaatgctctttgggaatttagctgaagagggcagtgttgctaaaattacaggaaaagaaggtttaaaatttcgaggaaaggccaaggtttttgaaggggaatacaaagctaatgacggaattagagatggaaaagttcaaaaaggagatgtagtggttatccgttatgaaggccctaaaggaggtccaggtatgccagaaatgctgaaacctactgctgcaataatgggagcagggttaggcaaagatgtcgctttgattaccgatggaagattctctggaggaactcatggttttgtagttgggcatatcactccagaagcccaagaaggcggcacgattgcccttgttgaagaaggggattatatcactattgatgccgagacaaacagtatcaatttagaagtatctgatgaggagctcatcaaaaggaaaaaaaattggaaggcaccaaatttaaaatttaaacgaggtgttctttataaatatgcgagaatggttaattctgcatcaaaagggtgcgtaacagacgaattttaa

SEQ ID NO: 210 - protein, 567 aa, Psychroflexus torquis
MIFENETDTMELNKYSKTVTQDPTQPAAQAMLHAIGLTKEDFFKPIIGIASTGYEGNPCNMHLNDLAKLAKQGTANEDIIGLIFNTIGVSDGISMGTPGMRYSLPSRDIIADSMETVVQAMSYDGLITVVGCDKNMPGALIAMIRLDRPCIMIYGGTIDSGCHNGKKLDVVSAFEAWGSKVAGTMQEEEYQSIVEKACPGAGACGGMYTANTMASSIEALGMTLPYNSSNPALSPEKKQESIKAGEALRVLLEKDIKPSDIITRKSLENAIRLITILGGSTNAVLHFLAIARAAEIDFTLTDFQTISDNTPFLADLKPSGKYLMEDLHEVGGIPAVLKYLLKKGLIYGDCLTVTGKTLAENLRDVEDLKEGQEVIKPIESPIKISGHLRMLFGNLAEEGSVAKITGKEGLKFRGKAKVFEGEYKANDGIRDGKVQKGDVVVIRYEGPKGGPGMPEMLKPTAAIMGAGLGKDVALITDGRFSGGTHGFVVGHITPEAQEGGTIALVEEGDYITIDAETNSINLEVSDEELIKRKKNWKAPNLKFKRGVLYKYARMVNSASKGCVTDEF

SEQ ID NO: 211 - DNA, 1677 bp, Flavobacteriales bacterium
atggaattgaataaatacagtaaaaacgttacccaagaccccacacaaccagctgctcaagcaatgttgtatgccataggttttaaagatgaagattttaaaaaaccattagttggtatcgcaagtacgggatatgagggcaacccttgtaacatgcatttgaatgatttggccaaattggtcaaggacggcgtgaattcaaaggaaacggttggtttgattttcaatacaattggggtgagtgatggaatatccatgggaactcctggaatgcgtttttcattaccatcaagggatattattgccgattcaatggaaacggttgtccaaggaatgtcgtatgacgccttggtaacggtggtaggctgtgataaaaatatgccgggagcattaatggccatgttaagattgaataggccatcaatattggtatacggcggtacaattgcctctggatgtcataatgatagaaaattggatattgtttctgcttttgaagcttggggagaaaaagtggctggtaccatggaggagtctgagtataaaagtataataaggaaagcgattcctggggcaggtgcttgtggtggtatgtacacggcaaataccatggcttcagccattgaagctttgggaatgtcattgccttataattcttccaaccctgcagacaattatctcaaagagaatgaatgtattgaagcaggtaagcaaatgcgcgtacttattgagaaagatattaaaccactggacattgtaactcgtaagtcattggaaaatgcgattcgtttagttactatcatgggtggctcaacaaatgcagtattacatttcttggcaattgctagagccgcagatatagaatttacactacaagattttcaacatattagtgatacaacaccttttattgcagatttaaagccaagtggcaaatatttaatggaagatgtgcaccgtgtaggtggtataccggctgtattgaaatatttattgaaaaacggacttttacatggggattgtttaacggttactggcaagacattggctgaaaatcttgaaaatgtcccagatttagaagaggggcaagatgtaattatgcctttggacaaaccaataaaagcaaccggacatttacgcatgctttatgggaatctggcagaaaatggttcagttgcaaaaattacgggaaaagaaggtttggtgtttaaaggaactgccaaagtgtttaatagcgagtatgacgccaatgatggtattcgaactggattggtgaaaaagggtgatgttgttgtaattcgatatgaagggcctaaaggaggtcctggaatgccagaaatgttgaaaccaacagcagcaattatgggagctggtttaggaaaagaagtagccttgattacagatggtcgtttttcaggaggaacacacggttttgtagtaggacatatttcacccgaagctcaagaaggtggtacaattggtttggttaaaaatggtgacataattaccattgatgctgaaactaattcaatcaatgttgctgtttctgatgaagaattggcaaaacgaaagaccgaatgggtacaaccagaattaaaattcaaaaagggcgtgctttataaatatgcgcgttcggtttcatctgctgcggaaggttgcgtaacggatgagttttaa

SEQ ID NO: 212 - protein, 558 aa, Flavobacteriales bacterium
MELNKYSKNVTQDPTQPAAQAMLYAIGFKDEDFKKPLVGIASTGYEGNPCNMHLNDLAKLVKDGVNSKETVGLIFNTIGVSDGISMGTPGMRFSLPSRDIIADSMETVVQGMSYDALVTVVGCDKNMPGALMAMLRLNRPSILVYGGTIASGCHNDRKLDIVSAFEAWGEKVAGTMEESEYKSIIRKAIPGAGACGGMYTANTMASAIEALGMSLPYNSSNPADNYLKENECIEAGKQMRVLIEKDIKPLDIVTRKSLENAIRLVTIMGGSTNAVLHFLAIARAADIEFTLQDFQHISDTTPFIADLKPSGKYLMEDVHRVGGIPAVLKYLLKNGLLHGDCLTVTGKTLAENLENVPDLEEGQDVIMPLDKPIKATGHLRMLYGNLAENGSVAKITGKEGLVFKGTAKVFNSEYDANDGIRTGLVKKGDVVVIRYEGPKGGPGMPEMLKPTAAIMGAGLGKEVALITDGRFSGGTHGFVVGHISPEAQEGGTIGLVKNGDIITIDAETNSINVAVSDEELAKRKTEWVQPELKFKKGVLYKYARSVSSAAEGCVTDEF

SEQ ID NO: 213 - DNA, 1677 bp, unknown
  unidentified eubacterium SCB49
atggaattaaataaatatagtaaacgcgttactcaagacgattcacaacctgcagcaaaagctatgcttcatgctattggtttgagtaaagaagacttagataaaccatttgttggtattgcgagtacaggttatgaagggaatccttgtaatatgcatttaaacgatttagcgcttgaagtaaaaaaaggtacaaaaaataaagatttagtaggcctaatttacaataccattggtgtgagtgatggtatttctatgggaacacctggaatgagatattccctaccctctagagatgtaattgcagattcaatggaaacggtagtagaaggaatgtcttatgatgcacttgttacggtagtaggttgtgataaaaatatgcctggagctttaatggctatgttacgtactaaccgacctggcgttttagtttatggaggcaccattgcttctggatgtcataatggtaaaaaattagatgtcgtttctgcttttgaatcttgggggcaaaaagttgctggaaaaatagatgaaaaagaatatcaagatgtcattgaaaaggcatgtcctggtgcaggtgcttgtggtggtatgtataccgcaaacacaatggcatctgctatagaggcattaggaatggcattaccatataactcttctaaccctgctttaggaacagaaaaaaaagcagaatgcataaaagctggcgaagctgtccgtttactccttgaaaaagacattaaacctaaagatattgtcacaaaaaaagcattagaaaatgccatcaggttagtaacaataatgggaggatctacaaatgccgtgttacattttttagcgattgctagaaccactgatgttgaatttacattagaggatttccaaaaaatatctgataccactccttttttagcagatttaaaacctagtggtcagtacttaatggaagatgtccatgcggttggaggaacacctgctgttttaaaatacttattaaaaaatggcttattacatggagattgtctaactgtaacaggaaaaacattggctgaaaacctccaagatgtacccgatttattagaaaatcaaaaggttataaaatcaataaacaaccctattaaagagacagggcatttaagaatattaagaggaaatttatcaccagaaggtgctgttgcaaaaattacaggaaaagagggctttaaatttacaggtaccgcaaaagtttttgattctgaatatgacgccaatgatggcattagagatggtaaagtacaaaaaggcgatgttgtagttattagatatgaaggtcctaaaggtggtcccggaatgccagaaatgctaaagcctacagcagcaattataggagctggattaggtaatgatgtagctttaattacagatggaaggttttctggtggtacgcacggttttgtagttggtcatatttcgccagaagcacaagtaggcggtcctattgcttttgtacaaaacggagatgagataactatcgacgccattaaaaataccatagactttaatatttccgaagaagttttagaaaaacgtaaagcagcctggaaacaacccgatttaaagtataaaaaaggggttttatataaatatgccagaactgtatcatgtgcatctaaaggttgcgtaacagatgaattttaa

SEQ ID NO: 214 - protein, 558 aa, unknown
  unidentified eubacterium SCB49
MELNKYSKRVTQDDSQPAAKAMLHAIGLSKEDLDKPFVGIASTGYEGNPCNMHLNDLALEVKKGTKNKDLVGLIYNTIGVSDGISMGTPGMRYSLPSRDVIADSMETVVEGMSYDALVTVVGCDKNMPGALMAMLRTNRPGVLVYGGTIASGCHNGKKLDVVSAFESWGQKVAGKIDEKEYQDVIEKACPGAGACGGMYTANTMASAIEALGMALPYNSSNPALGTEKKAECIKAGEAVRLLLEKDIKPKDIVTKKALENAIRLVTIMGGSTNAVLHFLAIARTTDVEFTLEDFQKISDTTPFLADLKPSGQYLMEDVHAVGGTPAVLKYLLKNGLLHGDCLTVTGKTLAENLQDVPDLLENQKVIKSINNPIKETGHLRILRGNLSPEGAVAKITGKEGFKFTGTAKVFDSEYDANDGIRDGKVQKGDVVVIRYEGPKGGPGMPEMLKPTAAIIGAGLGNDVALITDGRFSGGTHGFVVGHISPEAQVGGPIAFVQNGDEITIDAIKNTIDFNISEEVLEKRKAAWKQPDLKYKKGVLYKYARTVSCASKGCVTDEF

SEQ ID NO: 215 - DNA, 1689 bp, Gramella forsetii
atggataaaacagcaatgaacaacaaatatagtagtacaataacacaaagtgattctcaacctgcctcacaggcgatgcttcacgctataggattaaataaagaagatctcaaaaaaccttttgtgggaattgggagtaccggttacgaagggaatccctgtaatatgcaccttaatgaccttgctaaagaggtgaaaaaaggaactcagaatgccgatttaaacggacttattttcaatacaataggcgttagtgatgggatttccatgggaacgccgggaatgcgattctcactgccttccagagatctaatcgcagattctatggaaactgttgtaggaggaatgtcttacgatggcctggttactgtagtgggttgcgataagaatatgcccggtgccttaatggctatgttgagactgaacaggccttctgtgctggtgtatggcggaacgatcgcttccggttgccataatggtaaaaaactggatgtggtgtctgcatttgaagcctggggctcaaaagtttcaggggatatgcaggaagaagaatatcagcaggtaattgaaaaagcctgtccgggggcaggagcctgtggagggatgtatactgcaaatacaatggcctcctctatcgaagctttagggatgagtctgccgttcaacagttccaatcctgcaaccggacctgagaaaactcaggaaagtgtaaaagcaggggaggcgatgaaatatttgctggagaatgatctaaaaccaaaagatatagtgaccgcaaaatcactggagaatgcaattcgactattaacggtgcttggtggttctaccaatgccgtacttcattttcttgcgatagcaaaagctgcagagatcaattttggattaaaagattttacaagaatatgtgaggaaacgcctttcctggcagatttgaagcctagcgggaaatacctgatggaagatattcacaggattggaggaatcccggctgtgatgaaatatatgcttgaaaaaggactgcttcatggcgaatgtatgacagttaccggaaaaacgattgccgaaaatcttgaaaatgtaaagccattacctgacgatcaggatgtaattcaccctgtcgaaaaacctatcaaagctaccggacacatcagaattttatacggaaatctggcttctgaaggctccgttgccaaaataacgggaaaagaaggattggaatttcaaggaaaagcaagagtgtttaatggtgaatttgaagctaacgaagggatttcttcgggcaaggttcaaaaaggggatgtggtcgtcattcgctatgagggtcctaaaggaggacctggaatgccagaaatgctgaaaccaacttcggccattatgggcgccggactagggaaaagtgtagcccttatcaccgacggaaggttctcgggaggaactcatggctttgtggtgggacacattactcctgaggctcagcaaggcggactcattggtctgttgaaggatggtgacgagataagtattaatgccgagaaaaatactattgaggcacatctttcagcagaagaaataaatagaagaaaagaagcctggaaagctcccgctttaaaggtgaacggaggagtactctataaatacgcaaaaacggtagcatcagcttcagaaggctgcgtaacagatgaattttaa

SEQ ID NO: 216 - protein, 562 aa, Gramella forsetii
MDKTAMNNKYSSTITQSDSQPASQAMLHAIGLNKEDLKKPFVGIGSTGYEGNPCNMHLNDLAKEVKKGTQNADLNGLIFNTIGVSDGISMGTPGMRFSLPSRDLIADSMETVVGGMSYDGLVTVVGCDKNMPGALMAMLRLNRPSVLVYGGTIASGCHNGKKLDVVSAFEAWGSKVSGDMQEEEYQQVIEKACPGAGACGGMYTANTMASSIEALGMSLPFNSSNPATGPEKTQESVKAGEAMKYLLENDLKPKDIVTAKSLENAIRLLTVLGGSTNAVLHFLAIAKAAEINFGLKDFTRICEETPFLADLKPSGKYLMEDIHRIGGIPAVMKYMLEKGLLHGECMTVTGKTIAENLENVKPLPDDQDVIHPVEKPIKATGHIRILYGNLASEGSVAKITGKEGLEFQGKARVFNGEFEANEGISSGKVQKGDVVVIRYEGPKGGPGMPEMLKPTSAIMGAGLGKSVALITDGRFSGGTHGFVVGHITPEAQQGGLIGLLKDGDEISINAEKNTIEAHLSAEEINRRKEAWKAPALKVNGGVLYKYAKTVASASEGCVTDEF

SEQ ID NO: 217 - DNA, 1677 bp, Robiginitalea biformata
atgaacctgaacaaatacagtaaaaacgtcacacaggaccccacccaaccggcagcgcaggccatgctttatgccattggcctgaccgaggaggaccttgaaaaacccctgatcgggattgccagcaccgggtatgaaggcaacccgtgcaacatgcacctgaacgatctggcgctgcacgtgaaggaaggcgtgaaccgctccgatctggtagggctgattttcaatacgatcggggtgagtgacgggatatccatgggaacctacgggatgcgttattccctcccttcccgggatattattgccgattccatggagaccgtggtccaggcgatgaactacgacggcctggtaactgtagtgggctgtgacaagaacatgcccggggcgctgatggcgatgatccgcctgaaccgcccctccgtaatggtttacgggggaaccattgcatccggttgcctgaacaaccggaaactcgatgtggtatcggcttttgaggcctggggccagaaagtggccgggaatatgcaggaggaggaatacaaacaagtaatccagaacgcctgcccgggagctggtgcctgtggcgggatgtatacggccaacacgatggcatcggctatcgaagccctggggatggccctgccttacaactcttcgaacccagccaccggttcggaaaagcaggaagattgcacccgcgccggccaggcggtgcgcaccttgctcgaaaaagatatcaagccgctcgacattattacaaaaaagtccctggagaatgccatccgcctcgtagtggtgatgggggggtccacgaatgccgtcctgcacttcctggccattgccaaggcagcgcgcgtaccgtttaccctggacgatttccagcggatcagtgacgaaacgccctttttggcagacctgaagcccagcggcaaatacctgatggaagatgtccaccgggtgggcggcgtgcctgccgtccttaaattcctgctcgctgaaggcatgctccacggggattgcctgacagttactggaaaaacccttgccgagaacctaaaggatgtcccggatctggaagccggtcaggaggttatccggcccctttccgacccgatcaagaaaaccgggcacctgcgtatcctgtacgggaacctcgcacccacaggttcggttgccaaaatcaccgggaaggagggactccggttccagggacccgcccgcgtatttgaggacgaatttgaagcaaaccggggcataggcgaaggcaaagtttcccggggggatgtggtagtcatccgctacgaaggtccccagggtgggcctggtatgcccgaaatgctcaagcccaccagtgccatcatgggggccggcctgggcaaggatgtggccctgatcaccgatggccgcttttcgggtggtacccacggatttgtagtggggcatgtaacacccgaagcacaggccggaggcccgattgccctgctccgggacggggacatcatcaccatcgacgccgaagccaatacgctttcggtagacctgagcgacgaggagctcaaccggcggcgggcagcctggaaggcccctgaactaaaggtgaagcggggcagcctgtacaaatatgccaaaacggtttcatcggcctctgaaggctgtgttaccgatgaaatttga

SEQ ID NO: 218 - protein, 558 aa, Robiginitalea biformata
MNLNKYSKNVTQDPTQPAAQAMLYAIGLTEEDLEKPLIGIASTGYEGNPCNMHLNDLALHVKEGVNRSDLVGLIFNTIGVSDGISMGTYGMRYSLPSRDIIADSMETVVQAMNYDGLVTVVGCDKNMPGALMAMIRLNRPSVMVYGGTIASGCLNNRKLDVVSAFEAWGQKVAGNMQEEEYKQVIQNACPGAGACGGMYTANTMASAIEALGMALPYNSSNPATGSEKQEDCTRAGQAVRTLLEKDIKPLDIITKKSLENAIRLVVVMGGSTNAVLHFLAIAKAARVPFTLDDFQRISDETPFLADLKPSGKYLMEDVHRVGGVPAVLKFLLAEGMLHGDCLTVTGKTLAENLKDVPDLEAGQEVIRPLSDPIKKTGHLRILYGNLAPTGSVAKITGKEGLRFQGPARVFEDEFEANRGIGEGKVSRGDVVVIRYEGPQGGPGMPEMLKPTSAIMGAGLGKDVALITDGRFSGGTHGFVVGHVTPEAQAGGPIALLRDGDIITIDAEANTLSVDLSDEELNRRRAAWKAPELKVKRGSLYKYAKTVSSASEGCVTDEI

SEQ ID NO: 219 - DNA, 1677 bp, Tenacibaculum sp.
atggaattaaataaacatagcaaaagattaacccaagacgaatctcaaccagcttctcaagccatgttgtatgcagtaggtttatcagaagaagatatgagcaaagcccaagttggtattgcaagtacaggttatgatggtaatccatgtaatatgcatctaaacaatttagctgcagaagttaaagtagaaagtaaaattgctggtttagttgggttaggttttaatactattggagtttcagacggaatttctatgggaacttctggtatgaattattctttagcttccagagatataattgcagattcaatagaaactgtaatgaatgctcaaagttatgatgccttagtttctgtggtaggttgtgacaaaaatatgccaggagctgtaattgcaatgttacgtttaaataggccatcaattatgatgtatggaggtacaattgcctctggtagttataaaggtaaaaaattaaatattgtatctgcctttgaagctttaggtcaaaaagtagctggagaaatagatgagaatgaatacaaagaaattataaaaagagccattccaggagcaggtgcttgtggaggtatgtatactgcaaatacaatggcttctgcaatagaatgtatgggttttgctttgccttataattcttctattccagcagaaaatccaaataaactatctgaagcagaaagaacagctttagctattaaaaacttattagagttagatttaaaacctttagatatcatttctaaaaagtcgttagaaaatgctgttgctttagtaaatgctttgggtggatctacaaatgcagttttacactttttagctatagcacatgcagcagaaatagattttactttagaagattttcaaaaagtatcagatagaacgcctttaattgcagatttgaaaccatcaggaaaatatttaatggaagatgttcatggagttggaggtacgcctgcaattatgaaatatttattggataatgggtatttgcatggagattgcttaactgttacaggtaaaactttagcagaaaacttggcagatgttaaagcaatggagtttgaagctcaagatgttatttatccaaaagataaagctttaaaaacgtcaggaaacattcaaatcatttatggaaatctagcaacagaaggtgcagtagctaaaatttctggaaacgaaggcttgttgtttgaaggtaaagctgtggtttacgatggtgagcaagcagcaaatacaggtatttctaatggtgaagtagaaaaaggtgatgtagttgttattagatatgtggggccaaaaggtgggccaggaatgccagaaatgttaaagccaacttctttaattatgggagcaggtttaggtaaatctgtagctttaataacagatggacgtttttctggaggtacacatggttttgttgtggggcatattacaccagaagcacaatcaggaggagctattgggcttttagaaacaggtgataaaattagaattagtgcagaagacaactcaataaatgtgcttatttctgatgaagagttagagaaaagaagagcaaattgggtggctcctgctttaaaacataaaaaaggaattttatacaagtacgcaaaatctgtagcctctgcatctaaaggatgtgttactgatttataa

SEQ ID NO: 220 - protein, 558 aa, Tenacibaculum sp.
MELNKHSKRLTQDESQPASQAMLYAVGLSEEDMSKAQVGIASTGYDGNPCNMHLNNLAAEVKVESKIAGLVGLGFNTIGVSDGISMGTSGMNYSLASRDIIADSIETVMNAQSYDALVSVVGCDKNMPGAVIAMLRLNRPSIMMYGGTIASGSYKGKKLNIVSAFEALGQKVAGEIDENEYKEIIKRAIPGAGACGGMYTANTMASAIECMGFALPYNSSIPAENPNKLSEAERTALAIKNLLELDLKPLDIISKKSLENAVALVNALGGSTNAVLHFLAIAHAAEIDFTLEDFQKVSDRTPLIADLKPSGKYLMEDVHGVGGTPAIMKYLLDNGYLHGDCLTVTGKTLAENLADVKAMEFEAQDVIYPKDKALKTSGNIQIIYGNLATEGAVAKISGNEGLLFEGKAVVYDGEQAANTGISNGEVEKGDVVVIRYVGPKGGPGMPEMLKPTSLIMGAGLGKSVALITDGRFSGGTHGFVVGHITPEAQSGGAIGLLETGDKIRISAEDNSINVLISDEELEKRRANWVAPALKHKKGILYKYAKSVASASKGCVTDL

SEQ ID NO: 221 - DNA, 1677 bp, Polaribacter irgensii
atggaattaaacaaacatagcaaaagattaacacaagatgaatctcaaccggcatcacaagcaatgttgtacgctgtaggtttaacagatgaggacatgcagaaggcgcaaattggtattgcaagtactggatatgacggaaatccttgtaatatgcatttaaatcatctaaaagaagaggttaaagtagagtgtaatattgcgggtttagtcggtttagggttcaatacaattggggtgtcagatggaatttctatgggaacttcaggcatgaattattctttagtttcaagagatatcatagcagactctatcgaaacggttatgaatgcacaaagttacgatgcagtaattgctattgtgggttgtgataaaaatatgccaggatcagtgattgccatgctgcgtttaaatcgccctgcgataatgatgtatggcggctcgactgcatcgggaaattacaaaggaaaaaagttaaatattgtttccgcttttgaggctttaggtcaaaagatgtctggagaaattgaagaagaagagtatcgagaaataattaagagggccattccaggcgctggagcgtgtggtggtatgtacactgcaaatacaatggcttctgcgattgaatgtatggggttctcattgccttataattcttcaattccggcagaaaatccgaataaattgtctgaagcggaaagaactgccttggcgattaaaaacttactagaattagatttaaaacctttagatattatttctaagaaatctttagaaaatgccattacccttgtaaatgcgttaggagggtcaacaaatgccgtcttgcatttcttagcaattgcgcacgctgcagatattgagtttactttagaggattttcaaagagtgagtgacagaacaccattaattgcagatttgaaaccatcaggaaaatatcttatggaagatgtgcataatattggaggcacacctgcgatcatgaaatatttattagaaaatgactatttgcacggggattgtttgacggttacaggaaaaacattggctgagaatttagcaaatgttaaggcgatggaatttgaagagcaagatgtgatttacccaaaagagaacgcattaaaatcatcaggaaatattcaaataatttatggaaacctagcaactgaaggagcagtagcaaaaatatctggaaacgaagggctactttttgaaggaaaagctgtcgtgtatgatggtgagcaagctgcaaatacagggattacaaatggagaggtagaaagaggagatgtcgtcgttattagatacgtgggtcctcgaggaggtccaggaatgccagaaatgctgaaacctacgtccttaattatgggtgcaggtttaggaaagtctgtagcattaattacagatggaagattttctggaggaacacatggctttgttgttggacacattacaccagaagcacaatcgggaggaaccattgggattttaaaaactggcgatacaattagaattagtgcagaagataattctattaatgttttaatttctgaggatgaaattgcagcaagaaaagtaaaatgggttgcacccgcactaaagcatacaaaaggaattttgtataaatatgcaaaaacagtagcatccgcatctaaaggatgtgtaacagacttataa

SEQ ID NO: 222 - protein, 558 aa, Polaribacter irgensii
MELNKHSKRLTQDESQPASQAMLYAVGLTDEDMQKAQIGIASTGYDGNPCNMHLNHLKEEVKVECNIAGLVGLGFNTIGVSDGISMGTSGMNYSLVSRDIIADSIETVMNAQSYDAVIAIVGCDKNMPGSVIAMLRLNRPAIMMYGGSTASGNYKGKKLNIVSAFEALGQKMSGEIEEEEYREIIKRAIPGAGACGGMYTANTMASAIECMGFSLPYNSSIPAENPNKLSEAERTALAIKNLLELDLKPLDIISKKSLENAITLVNALGGSTNAVLHFLAIAHAADIEFTLEDFQRVSDRTPLIADLKPSGKYLMEDVHNIGGTPAIMKYLLENDYLHGDCLTVTGKTLAENLANVKAMEFEEQDVIYPKENALKSSGNIQIIYGNLATEGAVAKISGNEGLLFEGKAVVYDGEQAANTGITNGEVERGDVVVIRYVGPRGGPGMPEMLKPTSLIMGAGLGKSVALITDGRFSGGTHGFVVGHITPEAQSGGTIGILKTGDTIRISAEDNSINVLISEDEIAARKVKWVAPALKHTKGILYKYAKTVASASKGCVTDL

SEQ ID NO: 223 - DNA, 1698 bp, Pedobacter sp.
atgtcaacaacaccagaattaaaccgctatagcaaaacattcactcaagatcctacacaacctgccgcacaggccatgttgtatgggattggcctaacaaaagaggacctcgacaaagcccaggtaggcattgccagcatgggttacgatggaaacacctgtaacatgcacctgaacgacctcgctcaggtggtaaaaaaaggcgtctgggacaacggaatggttggcctgaccttcagcaccatcggtgtgagtgatggaatgtctaatggtacagacggaatgcgttactccctggtatccagagatgtcatcgccgattctattgagaccatctgtggcggacagtattatgatggtgtcatcaccattcctggatgtgacaaaaatatgccgggatccatcattgccatgggacgtctgaaccgcccctcgatcatggtatatggtggaagtatccactccggaaactataaaggcaaagccctgaacattgtttctgcttttgaagcattgggtcagaaacttgccggtaacatcgaagaagaagattatcaaggcatcatccgccatacctgccctggtgcgggtgcatgtggggggatgtataccgcaaatactatggcctctgcaattgaagcaatgggcatgagtttgccttatagctcctcctaccctgctaccagtcaggagaaaaaggatgaatgtatcaatgctgccaaagcaatccgtgttttgctggagagaaacattcttccaagtgacatcatgaccgagaagtcattccacaacgccatcgtaacggtgatggtactaggtggatctaccaatgccgtactccacctgattgcaatggccaaatctgtaggcctgaacctgaagatcgatgatttccaggacgtaagtaacaatactccggtacttgccgatttaaaacctagtggtacttacctgatggaagacctgcatgaaattggtggtgttcctgcagtattaaaatatctattgaaagaaggactgttgcatggcgactgtatgacggtaacgggtaaaacccttgctgagaatgtggctgatgccgtagacctggatttcgatcagcaaaagatcatcttcccggtcagcaacccgctaaaaacaactggtcacctgcagatcctgtatggcaacattgctcaaaaaggatcagtagcaaaaatcagtggtaaagaaggcgagaaatttgaaggccctgcacgtgtatttgacggggaaaaatcgttgatcgcaggaatcctgagtggacgtgtacgccagggtgatgtggtcgtgatcagacaggtaggccctaaaggagctcctggaatgcctgaaatgctgaaaccgacatctgccatcattggcgccggactgggtaaatcggttgccctgatcactgacggaaggttctccggaggtacacatggtttcgtagtgggacacatcactcctgaagcatgggatggtggaaacatcgcctttgttaatgatgatgacatgattaccattgatgcagtcaacaataccattaacctgaagatctctgatgaggaaatggctaaacgtaaggcagaatggaaacagttgcctccgccagtgaaaagcggtgtattgtacaaatacatcaagcaggttagtgatgccagcgaaggatgtgttactgacgcctacacacattaa

SEQ ID NO: 224 - protein, 565 aa, Pedobacter sp.
MSTTPELNRYSKTFTQDPTQPAAQAMLYGIGLTKEDLDKAQVGIASMGYDGNTCNMHLNDLAQVVKKGVWDNGMVGLTFSTIGVSDGMSNGTDGMRYSLVSRDVIADSIETICGGQYYDGVITIPGCDKNMPGSIIAMGRLNRPSIMVYGGSIHSGNYKGKALNIVSAFEALGQKLAGNIEEEDYQGIIRHTCPGAGACGGMYTANTMASAIEAMGMSLPYSSSYPATSQEKKDECINAAKAIRVLLERNILPSDIMTEKSFHNAIVTVMVLGGSTNAVLHLIAMAKSVGLNLKIDDFQDVSNNTPVLADLKPSGTYLMEDLHEIGGVPAVLKYLLKEGLLHGDCMTVTGKTLAENVADAVDLDFDQQKIIFPVSNPLKTTGHLQILYGNIAQKGSVAKISGKEGEKFEGPARVFDGEKSLIAGILSGRVRQGDVVVIRQVGPKGAPGMPEMLKPTSAIIGAGLGKSVALITDGRFSGGTHGFVVGHITPEAWDGGNIAFVNDDDMITIDAVNNTINLKISDEEMAKRKAEWKQLPPPVKSGVLYKYIKQVSDASEGCVTDAYTH

SEQ ID NO: 225 - DNA, 1680 bp, Flavobacteria bacterium
atggaattaaataaatatagtaaaacaataacacaagatccttctcaacctgcttctcaagcaatgttatatggaattggtttaactgaagaacaactagcaaaaccttttataggaattgcttcaatgggttatgatggaaatacttgtaatatgcatttaaatcatttagcagctttaattaaaaaagaagttaatgctaatgatatggtgggtttaattttcaacacaattggtattagtgacggtattactaacggaactgatggaatgcgttattctctagtaagtagagaaattattgcagatagtattgaaagtgttgtttcaggtcattactatgatggtgtaatttctattcctggttgtgataaaaatatgccaggaagtattattgcaatgggaagattaaatcgtccatcgataatggtttatggtggtacaattgcaccaggaaaataccaaggtaaagatttgaatattgtttcggcatttgaagcattaggagaaaaaattgcgggtactatttctgaagaagactataaaggaattataaagaattcatgtccaggtgcaggagcttgtggcggcatgtatacggcaaatacaatggctattgctattgaagcattaggaatgagcttaccttattcaagttcaaatcctgctataagtcatgataaaatagaagaatgtgaatctgccgctggatatttaaaattattattagaaaaaaatatttgtccaaaagacattatgacgtttgaagcatttgaaaatgctattaccgttttaattgctctaggaggaagtacaaatgccgttttgcatatgattgcaatggcaaaaagtgttggagtagctataagtcaggataattttcaacgattaagcaatacaactccattaattgccgattttaaaccgggtggaaattatttaatgcaaaacctacatgaaaaaggtggtgtgccaatggttttaaaatatttgctttctaaaggaatgttacatggaaattgtattacggtaacaggtaaaactttagcagaaaatttagaagcagtaatagatattgattttaacgatcaaaatattattcgtcagatagagaatccaataaaaactacagggcatcttcaaattttatatggaaatcttgctttaaaaggttccgtagcaaaaataacaggtaaagaaggcgaattttttaaaggtccagctcgtgtttttgatggtgaaaaagaattaataaaaggtatcgaagataaaaaaataaaagctggcgatgtcgtagttatacgatatgtaggtccgaaggggggacctggaatgcccgaaatgctaaagccaacatcagccttaattggtgctggtttaggaaaaagtgttgcattaattaccgatggtcgttttagtggaggaactcatggttttgtagtaggtcatatttcacctgaagcttatgatggaggtacaattgctttagttgaagatgaagatattatagaaattaatgctgttgataataccattcatttacatgttggtgatgaagaattagcgaatagaaaaagtaaatggaatcaaccaaaattaaaagtaactaatggtgtgttattaaagtatgcaaaattagttacagatgcttcaaatggttgtgtaaccgatgaatattag

SEQ ID NO: 226 - protein, 559 aa, Flavobacteria bacterium
MELNKYSKTITQDPSQPASQAMLYGIGLTEEQLAKPFIGIASMGYDGNTCNMHLNHLAALIKKEVNANDMVGLIFNTIGISDGITNGTDGMRYSLVSREIIADSIESVVSGHYYDGVISIPGCDKNMPGSIIAMGRLNRPSIMVYGGTIAPGKYQGKDLNIVSAFEALGEKIAGTISEEDYKGIIKNSCPGAGACGGMYTANTMAIAIEALGMSLPYSSSNPAISHDKIEECESAAGYLKLLLEKNICPKDIMTFEAFENAITVLIALGGSTNAVLHMIAMAKSVGVAISQDNFQRLSNTTPLIADFKPGGNYLMQNLHEKGGVPMVLKYLLSKGMLHGNCITVTGKTLAENLEAVIDIDFNDQNIIRQIENPIKTTGHLQILYGNLALKGSVAKITGKEGEFFKGPARVFDGEKELIKGIEDKKIKAGDVVVIRYVGPKGGPGMPEMLKPTSALIGAGLGKSVALITDGRFSGGTHGFVVGHISPEAYDGGTIALVEDEDIIEINAVDNTIHLHVGDEELANRKSKWNQPKLKVTNGVLLKYAKLVTDASNGCVTDEY

SEQ ID NO: 227 - DNA, 1677 bp, Flavobacterium psychrophilum
atgaacacaataaacaaatacagtaaaaccataacgcaagacgaaacccaaccagcagcacaagccatgctttatggaatagggttaacggaagcagatatgtataaagcacaagtaggaattgtaagtacaggttatgaaggtaatacttgcaatatgcacttgaacgatttagccaaagacgtaaaatttggagttgcatctgaaaatttagtcggattaatatttaatactataggcgtaagcgatggtatctctaacggtacagatggtatgcgattttcattggtatctcgagacataattgcagactctatagaaacagtggttagtgcacaatggtacgatgccgttttagccgtagtgggatgtgataaaaatatgcctggatctgtcatggctatgggaagactaaatcgacctgctataatgatatatggtggtagtattcattctggaaaatggaaaggagaatccttaaatattgtgtcggcttttgaagctttgggaaaaaaatttaacaatacaataaccccagaagattttaaaggtgttataaaaaacgcttgtccaggtgcaggtgcttgtggcggaatgtacaccgcaaacaccatggcttccgcaattgaagctttgggaatgagcttaccatatagttcgtctaatccagctttgagccaagaaaagaaacaagaatgtttagatgcaggcaaagcaatccgagttttattagaaaaagacatcaaacctaaagacatcatgaccaaaaaagccttcgaaaatgcaatgacgatggtggtggttcttggtgggtctacaaatgccgttttgcatttaatagccatggcacattcagtagatatagaattaaccctgcaagacttccaaaaaacaagtaacaacattcctgttttagcagatttaaaaccaagcggaaaatacctcatggaagatttacacgcagtgggaggggttcctgcggttatgaaatatttgctagaaaacaagctgttacacggtgattgcttaacagtaacagggaaaacagtagccgaaaatttagcaaatatccctagtttacatcaaggacaaactgtttttcttcctctaaaaacgccactaaaagccacaggacatttgcaaatcctttacggaaacctagcgccagaagggagtgttgcaaaaataagcggcaacgaaggtgatttctttgaagggaaagccaaagtttataatgatgaatataccgtgattgatggcgtaaaaaacggagaggttgcctctggagatgtagttgtaattagatattgcggaccaaaaggaggaccgggaatgccagaaatgctaaaacctacttccgcaataatgggagctggtttaggaaaaaatgtagcattaataaccgacggaagattctcggggggaactcatggttttgtagtggggcatattacacctgaagcttacgacggaggaaccattgcgctagtaaaagatggtgatacaattaccattaatactaaaaataacaccattcaattaaaagttagcgaagaagaattaaccaaaagaaaatccgaatggaaacaacctaaacttaaagctaccaaaggtgttttgtataaatatgcccaatgtgtttcaagtgcatctaaaggttgtgtaaccgataattaa

SEQ ID NO: 228 - protein, 558 aa, Flavobacterium psychrophilum
MNTINKYSKTITQDETQPAAQAMLYGIGLTEADMYKAQVGIVSTGYEGNTCNMHLNDLAKDVKFGVASENLVGLIFNTIGVSDGISNGTDGMRFSLVSRDIIADSIETVVSAQWYDAVLAVVGCDKNMPGSVMAMGRLNRPAIMIYGGSIHSGKWKGESLNIVSAFEALGKKFNNTITPEDFKGVIKNACPGAGACGGMYTANTMASAIEALGMSLPYSSSNPALSQEKKQECLDAGKAIRVLLEKDIKPKDIMTKKAFENAMTMVVVLGGSTNAVLHLIAMAHSVDIELTLQDFQKTSNNIPVLADLKPSGKYLMEDLHAVGGVPAVMKYLLENKLLHGDCLTVTGKTVAENLANIPSLHQGQTVFLPLKTPLKATGHLQILYGNLAPEGSVAKISGNEGDFFEGKAKVYNDEYTVIDGVKNGEVASGDVVVIRYCGPKGGPGMPEMLKPTSAIMGAGLGKNVALITDGRFSGGTHGFVVGHITPEAYDGGTIALVKDGDTITINTKNNTIQLKVSEEELTKRKSEWKQPKLKATKGVLYKYAQCVSSASKGCVTDN

SEQ ID NO: 229 - DNA, 1674 bp, Flavobacterium johnsoniae
atggaattaaataagtacagcaaaaccatcactcaagatcaaacacagcctgcggcgcaagcaatgttgtatggaattggtttaactgaagaagatttaaaaaaagcacaagttggtattgtcagcatgggttatgatggtaatacttgcaatatgcacttaaatgatttagcaaaagatgttaaaaaaggtgtttgggatgctggtctggtcggacttatttttaataccattggtgtaagtgacggaatttctaacggtacagaaggaatgcgttattcattagtttctcgtgatgtaatcgcagattctattgaaactgtagccggtgcacaatggtacgatagtattattgcaattcctggctgcgataaaaatatgcctggagcattaatcgcaatgggaagattaaaccgtccgtcaatgatggtttatggaggatctatccactcaggaaaatggaaaggtgaatctctaaacatcgtttctgcttttgaagctttaggaaaaaaagtaaaaggcgaaattactccggaagattttaaaggtgttattcaaaatgcttgtcctggagctggtgcctgcggtggtatgtatactgcaaacactatgtcttctgcaattgaagcattaggtatgagtatgccttacagttcttctaaccctgctttgagtcaggaaaaaagagacgaatgtattgctgccggagaagctattaaagttttattagaaaaagatattaagccaagagatattatgactcgtaaagctttcgaaaatgctattacaattgtagcagttttaggaggttctacaaacgcagttatgcacttaattgcaatggcacactctgttggtattacaattactcttgatgattttcaggcaattaacgacagaacacctgttcttgccgatatgaaaccaagtggtaaatatatgatggaagacattcacgaagtgggaggtattccgggtgtaatgaaatatttattgaaagtgggacttatccacggagattgtttaacagtaactggaaaaacagttgctgaaaacttagcttctacaccggatttacaagacggacaagaagtaattcatgaaattcaaaaagcgttaaaaccaacaggaaatattcaggttttatacggaaaccttgcttctgaaggagctgtggcaaaaatcagcggaaaagaaggggaatatttcgaaggaccagctgttgtatttgaaggggaatttgaagtaattccaggcttgcaggccggaaagattaaaccaggtaatgtcgtcgtcattagaggttgtggaccaaaaggtggtccgggaatgcctgaaatgctaaaaccgacatctgccattattggtgcaggattaggaagcagctgtgcacttattacagacggcagattctccggaggttcacacggattcgtggtaggacacgtaacaccagaggcttatgatggaggtggtattgcactagtaaaagatggagatttaattgctatcgatgctgtaaaaaatacaatcgacctgaaaatatctgacgaagaatttgcagctcgtaaagcggcttgggttcaaccagcgctaaaagttgacagaggggttttacttaaatacgcaagatcggtttctagtgcttcaacaggctgtgttaccgataattaa

SEQ ID NO: 230 - protein, 557 aa, Flavobacterium johnsoniae
MELNKYSKTITQDQTQPAAQAMLYGIGLTEEDLKKAQVGIVSMGYDGNTCNMHLNDLAKDVKKGVWDAGLVGLIFNTIGVSDGISNGTEGMRYSLVSRDVIADSIETVAGAQWYDSIIAIPGCDKNMPGALIAMGRLNRPSMMVYGGSIHSGKWKGESLNIVSAFEALGKKVKGEITPEDFKGVIQNACPGAGACGGMYTANTMSSAIEALGMSMPYSSSNPALSQEKRDECIAAGEAIKVLLEKDIKPRDIMTRKAFENAITIVAVLGGSTNAVMHLIAMAHSVGITITLDDFQAINDRTPVLADMKPSGKYMMEDIHEVGGIPGVMKYLLKVGLIHGDCLTVTGKTVAENLASTPDLQDGQEVIHEIQKALKPTGNIQVLYGNLASEGAVAKISGKEGEYFEGPAVVFEGEFEVIPGLQAGKIKPGNVVVIRGCGPKGGPGMPEMLKPTSAIIGAGLGSSCALITDGRFSGGSHGFVVGHVTPEAYDGGGIALVKDGDLIAIDAVKNTIDLKISDEEFAARKAAWVQPALKVDRGVLLKYARSVSSASTGCVTDN

SEQ ID NO: 231 - DNA, 1713 bp, Lactococcus lactis
atggaattcaaatataacggaaaagttgaatcaatagagctcaataagtattcaaaaacattgacacaagacccaacacagccagcgacccaagccatgcactatggcattggttttaaagatgaggacttcaaaaaagctcaggtcggaatcgtcagcatggattgggacggaaatccctgtaacatgcacttgggcacactcggtagtaaaatcaaaaattctgtcaatcaaactgacggactgattgggcttcaatttcacacgattggggtttctgacggaattgccaacggaaagcttggcatgagatattccttggtcagtcgtgaagttattgctgacagtattgaaaccaacgctggcgccgaatattacgatgcaattgtcgctgttcccggttgtgacaaaaatatgccaggctcaatcattggcatggctcggctcaatcgtccgtcaattatggtttatggtggaacgattgaacatggcgaatacaaaggcgaaaagttaaatattgtttcggcttttgaagcgcttggacaaaaaatcactggaaatatttccgaggaagattatcacggcgtcatttgtaatgccattccgggacagggtgcttgtgggggcatgtatacagcaaatacactggcttcggcaattgaaactttgggaatgagtttgccttattcggcttcaaatccagcggtcagtcaagaaaaagaagacgaatgtgatgaaattggtctggcaatcaaaaatttgctagaaaaagacatcaaaccaagcgatatcatgaccaaggaagcttttgaaaatgccataacgatcgtcatggttctcggtggttcaactaatgctgtgcttcatatcattgccatggctaatgccatcggtgtcgaaattacgcaagatgattttcaacgtatttccgatgtcacgcctgtgcttggcgacttcaagccaagtggcaagtacatgatggaagatttgcacaaaattggtggcgtgcctgctgttttgaaatatttgctcaaagagggcaagcttcatggcgactgtttgacagttactggtaaaactctagctgaaaatgttgaaacagcactggatttggactttgacagccaagacattattcgaccacttgaaaatcctatcaaagcaacaggtcatttgcaaattctctatggcaatcttgctgaaggtggttctgtggcaaaaatttctggaaaagaaggggaatttttcaaaggaacagctcgtgtctttgatggcgaacaacattttattgacggaattgagtcaggtcgtttgcacgcaggagatgtcgctgtcattcgtaatatcggtccagtcggaggcccaggaatgccagaaatgttaaaaccgacctcagccttgattggagcaggtcttggaaaatcttgtgctttgattactgacggacgtttctctggtggcacacatggctttgtggttggccacattgtccccgaagcggttgagggtggattgattggcttggtcgaagatgatgatattatcgagattgatgcggtcaataacagcattagtttgaaagttgctgacgatgagattgctagacgacgtgccaattatcaaaaacctgctcctaaagcaacgcgtggggttcttgctaaatttgctaaactcacgcgcccagccagtgaaggctgtgtgactgatttatag

SEQ ID NO: 232 - protein, 570 aa, Lactococcus lactis
MEFKYNGKVESIELNKYSKTLTQDPTQPATQAMHYGIGFKDEDFKKAQVGIVSMDWDGNPCNMHLGTLGSKIKNSVNQTDGLIGLQFHTIGVSDGIANGKLGMRYSLVSREVIADSIETNAGAEYYDAIVAVPGCDKNMPGSIIGMARLNRPSIMVYGGTIEHGEYKGEKLNIVSAFEALGQKITGNISEEDYHGVICNAIPGQGACGGMYTANTLASAIETLGMSLPYSASNPAVSQEKEDECDEIGLAIKNLLEKDIKPSDIMTKEAFENAITIVMVLGGSTNAVLHIIAMANAIGVEITQDDFQRISDVTPVLGDFKPSGKYMMEDLHKIGGVPAVLKYLLKEGKLHGDCLTVTGKTLAENVETALDLDFDSQDIIRPLENPIKATGHLQILYGNLAEGGSVAKISGKEGEFFKGTARVFDGEQHFIDGIESGRLHAGDVAVIRNIGPVGGPGMPEMLKPTSALIGAGLGKSCALITDGRFSGGTHGFVVGHIVPEAVEGGLIGLVEDDDIIEIDAVNNSISLKVADDEIARRRANYQKPAPKATRGVLAKFAKLTRPASEGCVTDL

SEQ ID NO: 233 - DNA, 1686 bp, Psychromonas ingrahamii
atgtcagaaataaataagtattcaaaaacagtgacgttagatgaatcacaaccggcttcacaggccatgctttatgctattggtttgaaagaagaggatatgaaaaaagcgcaagtgggtattgtttcaacaggatgggaaggaaatccatgcaatatgcacttaaacgaatttgctaaagacgtgaaaaaaagtgtgaacgcagctgatttggtgggattaatctttcacacaatcggagtgagtgatggtatttcaaacgggactaccgggatgaagtactctttagtgtctcgtgagatcattgctgattctattgaaacggttgtaagtgcgcaattttatgatgcgattgttgccattgtaggatgtgataaaaatatgcccggtgcaatgatggcattgtcgcgtttaaatcgtccgggaatattggtttatggcggttcggttaaagctggaaaatggaaaggtgaagacttgaatatcgtttctgctttcgaagcttatggaaaaaaattacagggtgttatctcccatgaagattataaaggggtaattcaaaatgcgatcccgggtccgggtgcttgtggtggaatgtatacggcaaatactatgtcttcagctattgaagcgttaggcatgagtttgccttactcttcatcgaacccggcggttagcgatgacaaaaaaagagaattaacaacagtgggtgatgcagttaaaaacctgctggaaaaagatattaaaccaaaagatattatgaccaaaaaagcgttcgagaatgccttaagaattattatgattttagggggctctaccaatgcaactttacatatgattgcaatggcccgatcatcaggtgttgacttgagtttagatgatttccaaaagatggcagataaaacgccattattggcaaatttaaaaccttccggggaattcctaatgcaagacttacatgaaatcggcgggatccctgcagtcatgaaatacttattggctgaaggtttattacatggggattgtttgaccgttacaggtaacaccattgctgaaaacttagctgatttacccggccttcctgatgatcaggacattatcagacctttgtctaaccccttgaaagaaactggccacttacagattctttatggaaacttggcacctgaaggttcagttgcaaagattacaggtaaagaaggcgaagtattcgaaggcccggcaagagtttatgaagatgaattttcagcaataaaaggtatcggagacgaagtgcaaaaaggtgaagttatcgttatccgttattcaggaccaaaaggtgcgcctggcatgccagaaatgctaaaaccaacttcagctgtaatgggggcgggtcttggaaaagacgtggcattaattacagatggcagattctccggaggttctcatggttttgttgttggacacgtgacgccagaggcatcggaaggtggattgattgccctggtccaaaatggagacatgatccgaattgattctgttactaacaaattggaattgaaagtcgatcaggctgaaatcaacaagcgtaaagctgcttggataaaaccagcttacagagcgacaaatggtgtactaagaaagtatatcgccacggtaaaatctgcctctctaggatgtgttaccgatgaaatagacgaactgtag

SEQ ID NO: 234 - protein, 561 aa, Psychromonas ingrahamii
MSEINKYSKTVTLDESQPASQAMLYAIGLKEEDMKKAQVGIVSTGWEGNPCNMHLNEFAKDVKKSVNAADLVGLIFHTIGVSDGISNGTTGMKYSLVSREIIADSIETVVSAQFYDAIVAIVGCDKNMPGAMMALSRLNRPGILVYGGSVKAGKWKGEDLNIVSAFEAYGKKLQGVISHEDYKGVIQNAIPGPGACGGMYTANTMSSAIEALGMSLPYSSSNPAVSDDKKRELTTVGDAVKNLLEKDIKPKDIMTKKAFENALRIIMILGGSTNATLHMIAMARSSGVDLSLDDFQKMADKTPLLANLKPSGEFLMQDLHEIGGIPAVMKYLLAEGLLHGDCLTVTGNTIAENLADLPGLPDDQDIIRPLSNPLKETGHLQILYGNLAPEGSVAKITGKEGEVFEGPARVYEDEFSAIKGIGDEVQKGEVIVIRYSGPKGAPGMPEMLKPTSAVMGAGLGKDVALITDGRFSGGSHGFVVGHVTPEASEGGLIALVQNGDMIRIDSVTNKLELKVDQAEINKRKAAWIKPAYRATNGVLRKYIATVKSASLGCVTDEIDEL

SEQ ID NO: 235 - DNA, 1677 bp, Microscilla marina
atgacagttttgaacaaatacagccgacgaattactcaggatgtaacccaaccagcctctcaagcaatgctgtatggcatagggcttactaaagaggatatgagcaagcctcaaataggcatagtaagtactggttatgagggcaatacctgcaacatgcacctcaatgatctggccttggaaaccaaaaaaggtactaaagaagcagacttggtagggttggtattccatactataggcgtaagcgacggaatatctaacggtaccgaaggaatgcgtttttcgttgccttcacgcgacattatcgccgactcgatagagactgtagtgcaggctcaatggtacgatgggatacttgctgtagtgggttgcgacaaaaacatgccgggagctatgatggctctggcgcgtttgaaccgtcctggactgcttgtttacggcggaagcatcaggtcaggctgtcacaaaggtcaaaaactcaatattgtgtctgcctttgaagcactcggacagcgttttaacggaagtttgaatgaagaagattatcaaggaattatccaaaactcttgccctggtgcaggagcttgtggcggtatgtatactgccaacacgatggcaacagtgatagaagctattggattgggcttaccttatggagcctctaatcccgcccaaagccctgaaaaacaacaagaatgtatagatgcgggcaaagctatgagaaagctgctcgaagaggacatcaaacccctcgacatattgaccaaaaaagcttttgaaaatgccttgacaatgatcatggtcatgggaggctctaccaatgcggtgctgcacatgattgccattgccaaagctgctgaggtggatctaagcctggaagattttcaacgtatcagcgacaaaactccttatttggcaaatctcaagcctagtggaaagtacttgatggaagacttgcacaccattggtggcacccctgctgtaatgaagctattgctggacgagggattgctacacggtgattgtttgacggtaacgggcaaaacgcttgctgagaatcttgctaacattgctccggtaaaagacgatcaggacgtgctgttcccaataagccaacctctaaaacctcagggacatttacaagtgttatttggcaacctggccacacaaggggcagtagctaaaattacgggcaaagagggagaaaaatttgaaggtactgccaaggtgtacgacggagagtttgaggctatcaaaggtattcaggacggagaagtaaaagctgggcacgtggtagtcattaggtacgaaggccccaagggtggtccgggaatgcctgaaatgctcaagcctacctctgcaataatgggtgccgggctgggcaatagcgtggcattgattacagatggtaggttttcgggtggttcacacggttttgtagtgggacacgtgtgccctgaagcacaggaaggtggcttgattgccttgcttaaggatggcgatcgaatcacgattgatgcggtagacaaccaaatggtggcgcacttatcagaggaagaaatagcccaacgacgcgcccaatggcaagcaccagaatcgcgctttacccgtggaattttaggcaaatatgcccgtactgtttcgtcggcctcggagggctgtgtaacggatgaatag

SEQ ID NO: 236 - protein, 558 aa, Microscilla marina
MTVLNKYSRRITQDVTQPASQAMLYGIGLTKEDMSKPQIGIVSTGYEGNTCNMHLNDLALETKKGTKEADLVGLVFHTIGVSDGISNGTEGMRFSLPSRDIIADSIETVVQAQWYDGILAVVGCDKNMPGAMMALARLNRPGLLVYGGSIRSGCHKGQKLNIVSAFEALGQRFNGSLNEEDYQGIIQNSCPGAGACGGMYTANTMATVIEAIGLGLPYGASNPAQSPEKQQECIDAGKAMRKLLEEDIKPLDILTKKAFENALTMIMVMGGSTNAVLHMIAIAKAAEVDLSLEDFQRISDKTPYLANLKPSGKYLMEDLHTIGGTPAVMKLLLDEGLLHGDCLTVTGKTLAENLANIAPVKDDQDVLFPISQPLKPQGHLQVLFGNLATQGAVAKITGKEGEKFEGTAKVYDGEFEAIKGIQDGEVKAGHVVVIRYEGPKGGPGMPEMLKPTSAIMGAGLGNSVALITDGRFSGGSHGFVVGHVCPEAQEGGLIALLKDGDRITIDAVDNQMVAHLSEEEIAQRRAQWQAPESRFTRGILGKYARTVSSASEGCVTDE

SEQ ID NO: 237 - DNA, 1689 bp, Cytophaga hutchinsonii
ttgattattgtgagtacagaattaaataaaataagtaaacgtttaacccaggatccatctcagcccgcatctcaggcaatgatgtatggagctgggtttacagacgaggatatgaaaaagccaatcgttggtattggcagtacaggtttcgatggtaacacatgtaacatgcacttaaatatccttgccggacaagttaaaggcagtattacgcgtggcggtatggttggacttggtttcaacacgatcggcgtaagtgatgggatttcaatgggtacagaagggatgcgtttctctcttgtatcacgcgacgtaattgcggattcaattgaaacaatttgtgaagctcattactacgatgcgttggtaaccgttgtaggttgtgataaaaacatgcctggcgcacttattgcaatggctcgcttgaatcgcccgtcaatcatggtatacggcggtacaattcactcaggtcactacaaaggcgaaaaactaaacatcgtttcagcttttgaagcattgggtaaaaaagtagccggcacaatcactgaagaagattaccagggtgtaattaaaaatgcatgtccgggtgcgggtgcctgtggtggcatgtacacagcaaacacaatggcatctgcaattgaagcaatgggattaacacttccttattcttcaacggcacctgcaacaagcgaaaagaaaaaggcagaaacattggcgcttggcaaagcaatgatgcatctgctggagaaagatatcaagccgcgtgatatcatgacattcgaggcatttgaaaatgctatccgtgtgatcctggtattgggtggttctacaaatgcggtaatgcacttaattgcaattgcaaaagctgcgggtgttaaattaacgatcgatgattttcaacgcatcggtaatacaacaccgttactggcagatttaaaaccaagcggcaagtatatgatggaagatatggacgctattggcggcgtaccttctgtaatgcgtttgttggcaaaacataatttacttcatttagattgtatgactgtaacaggtaaaactgttggagagaatttaaaagaagctcaggatcttcctacggatcaggatctgatgtatgcatgggaaaacccgatcaaacaaacaggtcacttacagattctgtatggcaatcttgcaccacaaggttctgtggcaaagattaccggtaaagaaggaacatactttgaaggtcctgcacgcgtgtacgactctgaagaggctgtaaacaaaggtttagaggctaatgaagtaaaatcaggtgaagtaattgtaatccgttatgttggtccgaaaggcggcccgggcatgcctgaaatgttgaagccaactgctctattaatgggcttaggtttaggcaacgaatgtgccttaatcacagacggacgtttctctggcggtacacatggtttcgtagttggccacattacaccggaagcaacagaagggggtatgattggccttgtaaaaaatggcgacatcatccgtattgatgcagtaaacagagtcctagaagttaaaatttccgaggaggaagtaaccaaacgccgtgcggcatgggtaaaacctgcgccaagagctacatccggcgtgttatataaatacatgaaattagtatcttctgcatctgagggatgcgttaccgataattaa

SEQ ID NO: 238 - protein, 562 aa, Cytophaga hutchinsonii
MIIVSTELNKISKRLTQDPSQPASQAMMYGAGFTDEDMKKPIVGIGSTGFDGNTCNMHLNILAGQVKGSITRGGMVGLGFNTIGVSDGISMGTEGMRFSLVSRDVIADSIETICEAHYYDALVTVVGCDKNMPGALIAMARLNRPSIMVYGGTIHSGHYKGEKLNIVSAFEALGKKVAGTITEEDYQGVIKNACPGAGACGGMYTANTMASAIEAMGLTLPYSSTAPATSEKKKAETLALGKAMMHLLEKDIKPRDIMTFEAFENAIRVILVLGGSTNAVMHLIAIAKAAGVKLTIDDFQRIGNTTPLLADLKPSGKYMMEDMDAIGGVPSVMRLLAKHNLLHLDCMTVTGKTVGENLKEAQDLPTDQDLMYAWENPIKQTGHLQILYGNLAPQGSVAKITGKEGTYFEGPARVYDSEEAVNKGLEANEVKSGEVIVIRYVGPKGGPGMPEMLKPTALLMGLGLGNECALITDGRFSGGTHGFVVGHITPEATEGGMIGLVKNGDIIRIDAVNRVLEVKISEEEVTKRRAAWVKPAPRATSGVLYKYMKLVSSASEGCVTDN

SEQ ID NO: 239 - DNA, 1764 bp, Rhodopirellula baltica
ttgaccctttcaaggtgttgccacccatcttcggccgctttcccctgccaaaacgatctcatgaccgcgtctcagcctgaatccgattccaatgcactgaacaagtacagcagcaagatcacccagccgaaaagccagggtgcgtcgcaggcgatgctttacgccaccggcatgtcctcggaggatatgaacaagcctcaagtcggcatcggcagcatgtggtacgagggcaacagctgcaacatgcacctgctcgatctcgcagcggatgttaaagctggagtcaccgacgccggaatggtcggaatgcgtttcaacaccatcggtgtctcggacggcatctcgatggggaccgacgggatgagcttctcactgcaaagtcgcgacctgatcgccgactcgatcgagacgatcatgggggcgcagtggtacgacgcgttgatcaccctgcccggctgcgacaagaacatgcccggctgtttgatggcgatgggacgtctgaaccgtccttccatcatggtctacggtggaacgattaaacctggcagctaccgcgacgagaagctggacatcgtcagcgcgttccagtgctacggccagttcatcgcgggacaaatcagcgaagaagaacgcagtgaaatcgttcgccgcagttgcccaggtgcgggagcatgcggcggcatgtacaccgccaacacgatggccaccgcaatcgaagccttgggcatggccctgccctactccgccagcatccctgcagagcatccagaaaagaaagaggaatgcaaacgtgccggtttggccatcctcgaactgttgaagaaggacatcaagcctcgcgacatcatgactcgcggtgcattcgaagacgcgatggtgacattgatggcactgggcggcagcaccaacgcggtgcttcacttgatcgcgatggctcgcagcgtcgatgtgccactgacgattgaagacttccaatcggtcagcgaccgcacacctttcttggccgacctgaaacccagcggcaagttcgttcaagaagacctgcacagcgtcggtggcacgcccgcggtgatgaagtacttgctcgaaaagggcatgatcaaaggcgagcacatgaccgtcaccggcaagactctcgcggagaacctggccgatttgcctggtttgaagaccggccaaaagatcgtgtcgacggtcgaagagccgatcaaaaaatcgggtcacattcgaatcctgaaaggatcactggccacggaaggcgcggtcgcgaaaatcactggcaaagaaggtctgcagttcagcggaccggctcgtgtctatgacaatgaggaattgatgctcgccgctttggaacaaaagcagattcaaaagggtgacgtcgttgtgatccgctacgaaggtcccaagggcggacccggcatgcctgagatgttgactccaaccagtgccatcatgggtgctggtttgggaagcgacgtcgcgatgctgactgacggccgtttcagcggcggtagtcacgggttcatcgtggggcacatcactcccgaagcacaagttggtggtccgatcgcattgatcgaagatggagacacgatcacgattgatgccgaaaccaactcgttggacttagaagtcgatgcggctgaattggaagcccgccgatccaagtggaccgcaccgccactgaaagccacccgcggaacgctctacaagtacatcaagtgcgtgaagagcgccagcgaaggctgcgtcaccgacgagtga

SEQ ID NO: 240 - protein, 587 aa, Rhodopirellula baltica
MTLSRCCHPSSAAFPCQNDLMTASQPESDSNALNKYSSKITQPKSQGASQAMLYATGMSSEDMNKPQVGIGSMWYEGNSCNMHLLDLAADVKAGVTDAGMVGMRFNTIGVSDGISMGTDGMSFSLQSRDLIADSIETIMGAQWYDALITLPGCDKNMPGCLMAMGRLNRPSIMVYGGTIKPGSYRDEKLDIVSAFQCYGQFIAGQISEEERSEIVRRSCPGAGACGGMYTANTMATAIEALGMALPYSASIPAEHPEKKEECKRAGLAILELLKKDIKPRDIMTRGAFEDAMVTLMALGGSTNAVLHLIAMARSVDVPLTIEDFQSVSDRTPFLADLKPSGKFVQEDLHSVGGTPAVMKYLLEKGMIKGEHMTVTGKTLAENLADLPGLKTGQKIVSTVEEPIKKSGHIRILKGSLATEGAVAKITGKEGLQFSGPARVYDNEELMLAALEQKQIQKGDVVVIRYEGPKGGPGMPEMLTPTSAIMGAGLGSDVAMLTDGRFSGGSHGFIVGHITPEAQVGGPIALIEDGDTITIDAETNSLDLEVDAAELEARRSKWTAPPLKATRGTLYKYIKCVKSASEGCVTDE

SEQ ID NO: 241 - DNA, 1683 bp, Blastopirellula marina
atgtccgccccgctcaacaagtacagcagccgcgttacccagccaaaaagccagggcgcgtcgcaggccatgctttacggaaccggcatgaccgacgccgacatggacaaagcgcaggttggcatcgccagcatttggtacgagggcaacacgtgcaacatgcacctgaatcagctctcggaagtggtgaaaaaaggggtggtaggcgccgacatggtcgggatgcggttcaacacgatcggcgtgagcgacggcatctcgatggggaccgaagggatgagcttctcgctccaatctcgcgacctgatcgccgactcgatcgaaacggtcatgggcggtcagtggtacgacggactgatcgcgctgccgggctgcgacaaaaacatgccgggatgtttgatcgcgatggggcgtttgaaccgtccgtcgatcatggtctacggcggtacgatcaaaccgggccacaccagcaagggagagaagctcgacatcgtctcggctttccagtgctacgggcaattcctctcggaaggaatcaccgaagaagaacgcaaagaaatcgtgcacaaagcttgtcctggagcgggcgcttgcggcggcatgtacaccgccaacacgatggcgacggcgatcgaagcgatgggcatgacgctgccttacagcagcagcattccggccgaagatccggcgaagcagcaagaatgcatcgacgccggcaaagcgatgcgctacttgctggagaaagatattaagccgcgcgacatcatgacccgtgatgcgtttgaaaacgcgatggtcacggtgatggcgctcggcggttcgaccaacgccgtgttgcacttgatcgcgatggctcgcgcggtggatgtcgacctgtcgatcgacgacttccaaacggtcagcgatcgcgtccctttcttggccgatctgaagccgagcggcaagtttgtgcaagaagatctgcactcgatcggcggtacgccggccgtcctgaagtatctgctggccgaaggcttcttgaagggggactgtatgacggtgaccggcaagacgctggccgaaaacatcgccgatcttcccggcttgaaagaaggccagaagatcgtccacccactgtcggacccgatcaagtcctccggtcacatccagatcttgaagggcacgctggcccccgaaggcgccgtcgccaagatcaccggcaaagaaggactccgctttcaagggccggccaatgtctttgatagcgaagaagacatgttgcacgcgctggaagacaagaagatcaaaaagggagacgtcgtcattattcgctacgaaggtcccaagggaggccccggcatgccggagatgctgactccgacctcggcgattatgggggccggtctcggcagcgatgtcgcactgctgaccgatggccgcttctccggcggctcgcacggtttcatcgttgggcatatcacgcctgaggcgcaagacggaggcccggtcgcgctcgttcaaaatggcgacatcgtcacgatcgacgccgacaccaactcgattgacgtcgacgtgccggccgatgagatggcgaaacgcttggccgcttggaaggctccggcctacaaagcgacccgcggcacgctttacaagtacatcaagaatgtgaaaagcgcttcagaaggttgcgtgaccgacgaataa

SEQ ID NO: 242 - protein, 560 aa, Blastopirellula marina
MSAPLNKYSSRVTQPKSQGASQAMLYGTGMTDADMDKAQVGIASIWYEGNTCNMHLNQLSEVVKKGVVGADMVGMRFNTIGVSDGISMGTEGMSFSLQSRDLIADSIETVMGGQWYDGLIALPGCDKNMPGCLIAMGRLNRPSIMVYGGTIKPGHTSKGEKLDIVSAFQCYGQFLSEGITEEERKEIVHKACPGAGACGGMYTANTMATAIEAMGMTLPYSSSIPAEDPAKQQECIDAGKAMRYLLEKDIKPRDIMTRDAFENAMVTVMALGGSTNAVLHLIAMARAVDVDLSIDDFQTVSDRVPFLADLKPSGKFVQEDLHSIGGTPAVLKYLLAEGFLKGDCMTVTGKTLAENIADLPGLKEGQKIVHPLSDPIKSSGHIQILKGTLAPEGAVAKITGKEGLRFQGPANVFDSEEDMLHALEDKKIKKGDVVIIRYEGPKGGPGMPEMLTPTSAIMGAGLGSDVALLTDGRFSGGSHGFIVGHITPEAQDGGPVALVQNGDIVTIDADTNSIDVDVPADEMAKRLAAWKAPAYKATRGTLYKYIKNVKSASEGCVTDE

SEQ ID NO: 243 - DNA, 1692 bp, Planctomyces maris
atgtcagccgattcgcaacccgttttgaacaagtacagttcccgtatcacacagccccgttcgcagggtgcctcgcaagccatgctctacgccaccggcatgagcgaagaggatatgaacaaggcccaggtcggaatttccagcgtctggtacgaaggcaattcctgcaacatgcacctcaacaaactggctgccaaggtcaaagagggcgtcgaagccgccgatctggttggcctgcggtttaataccatcggtgtgagcgacgggatttccatgggcaccgacggcatgtcctattcgctgcagtcccgcgacctgatcgccgacagtatcgaaacagtcacctgtgcccagtggtacgatgccaacatttcgctgcctggctgtgataagaacatgcctggctgcctgattgccatgggacgatttaaccgcccctcgatcatggtttacgggggaacgattgctcccggctgtctgaataatcagaagctggacattgtctccgcatttcagtcttacggcgaatacctggctggtacgatcacagatgaaacccgaaaagaaatcgtacagaaaagctgtccgggcgctggtgcctgcggcggcatgtataccgccaacacgatgtcgtctgccatcgaagctctggggatgtcactcccttacagttcttccattcctgcagagcatcccgataaactcgatgagtgtatccgcgctggtgccgccatcaggaaactgctggaactggatctgaaaccccgcgacatcatgacccgcgaggctttcgaaaatgcgatggtactgattgtcgcactggggggatcgaccaacgccgtgctgcacatgctggccatcgcccgttctgtcggcctggaactgactattgatgacttccagtccgtcagcgatcgtattcctttgctggccgatttcaaacccagtggtaaatacgtgatggctgacctgcaggagattggcgggacaccagccgtgatgaaatacctgctggaaaaaggcctgatcaacggcgactgcatgacggtcacgggaaaaacagtggccgaaaacctggcagaactaccgggcctcaaagagggtcaggatatcattcacgctgtcgaaaacccgatcaagccgaccggtcacctgcagatacttaaaggcaacctggctccgacaggtgccgtcgccaagatcaccggtaaggaaggcctggtcttcgaagggaccgccaacgtcttcgattccgaagaggacatgctcaaagccctcgaagacaagcagattcaaaaaggcgatgtgatcatcatccgctacgaaggccccaaagggggaccagggatgcccgaaatgctgaccccgacttccgccatcatgggagccggcctgggtaaggatgttgccctgctgaccgacggtcgtttttctggtggttcacacggctttatcgtcggacatatcactcctgaagcacaggaaggcggtccaatcgccctggtcaaaaatggcgacaaggtcattatcgacgccgacaaaaatcgactggagatggatgtcagtgatgcagagctcgaagaacgtcgcaaagcctggacggcccctccgtttaaatacacgcggggtacactttacaaatatatcaagaatgtgaaatccgcttctgaaggttgtgtgaccgacgagtaa

SEQ ID NO: 244 - protein, 563 aa, Planctomyces maris
MSADSQPVLNKYSSRITQPRSQGASQAMLYATGMSEEDMNKAQVGISSVWYEGNSCNMHLNKLAAKVKEGVEAADLVGLRFNTIGVSDGISMGTDGMSYSLQSRDLIADSIETVTCAQWYDANISLPGCDKNMPGCLIAMGRFNRPSIMVYGGTIAPGCLNNQKLDIVSAFQSYGEYLAGTITDETRKEIVQKSCPGAGACGGMYTANTMSSAIEALGMSLPYSSSIPAEHPDKLDECIRAGAAIRKLLELDLKPRDIMTREAFENAMVLIVALGGSTNAVLHMLAIARSVGLELTIDDFQSVSDRIPLLADFKPSGKYVMADLQEIGGTPAVMKYLLEKGLINGDCMTVTGKTVAENLAELPGLKEGQDIIHAVENPIKPTGHLQILKGNLAPTGAVAKITGKEGLVFEGTANVFDSEEDMLKALEDKQIQKGDVIIIRYEGPKGGPGMPEMLTPTSAIMGAGLGKDVALLTDGRFSGGSHGFIVGHITPEAQEGGPIALVKNGDKVIIDADKNRLEMDVSDAELEERRKAWTAPPFKYTRGTLYKYIKNVKSASEGCVTDE

SEQ ID NO: 245 - DNA, 1680 bp, Algoriphagus sp.
atgaccctgaaaaaacacagttgggaaatcagcgacaattcggagcatccggctgggatggctatgttgtatgccaccggaatgagcgataaaaagatgaaacagccatttgtagggatagcgagttgcggctatgaaagtaatccctgcaatatgcatttgaacgactttgccggtctgatcaaagcttcttcacaagagcaagatctgaccggtttagtttttaataccattggtatttctgacggaaccacgatgggaaccttggggatgcgttattcactggtttctagggagataattgctgattctatagagtcttttatcatagggcattcatttgatgcttgtatttctgttgcaggatgtgacaagaatatgcctggtgcattgatggggatgatccgtactaacagaccttctattttggtgtatggaggaacgatagcctctggacattataagggagaaaagctaaatatcgtttcggcatttgaagcctttggaaagcgagtgaatggaaacatttctgatgaagattatgatggtgtcatcagaaacgcatgtccaggaaaaggagcttgtggaggtatgtatactgccaataccatgtcttcagcaattgaagcgatgggaatgtcattgccttactcctcttcttatccggcaaactctccagaaaaattgagggagtgtggagaagtgaataaatatatgagaatccttttagaaaaggatttgaaacctagtgatatcatcactagaaaaagtattgaaaatgcagtaaccgtagcaattgccttaggtggtagtaccaatgcggtaatgcatatcattgcgatcgcccgaactgccggtgtagattttaccattgaggattttaaagcaatcaatgcaaaaactccaatgattggtgatttcaaaccttctggaaaattcatgatggaagaccttcacgaacaaggtggacttcctgcctttatgaagtatatgttgcagaatgggttcattcatggagattgcttaactgtgactggaaagacggttgcagaaaaccttgagaatattgaacctgtgactccatcgatggtgaatgttattcatcctttggaaacgccgataaaagcaacgggtcatttatgtgtgctttcaggaaatcttgctccagaaggagcggttgccaaaattacaggtaaagaaggaagttcttttacaggacctgcacatgtttttgactcagagcaggatgccaatgatgctatcagagatcataaaattgagaagggtgaagttattgtcattcgaaatatcggacccaaaggtggtccaggaatgcctgaaatgttgaagcctacttctatgattataggagctggtttaggatcagacgttgccttaattactgatggaagattttccggaggaacacacggatttgtggtagggcacgttacaccagaagcgtttagcggaggacctatcggattggtcagaaatggagatatcatcacgatagatgctgataacttacagctgagcgttgcgatttctgaagaggagtttgaagaaagaaagaaaacttggaaacgaaaagaaatttctgatttgcaagggactttgaaaaaatacaataaacttgttgccactgcatctgaaggttgcgtgacagataaattctaa

SEQ ID NO: 246 - protein, 559 aa, Algoriphagus sp.
MTLKKHSWEISDNSEHPAGMAMLYATGMSDKKMKQPFVGIASCGYESNPCNMHLNDFAGLIKASSQEQDLTGLVFNTIGISDGTTMGTLGMRYSLVSREIIADSIESFIIGHSFDACISVAGCDKNMPGALMGMIRTNRPSILVYGGTIASGHYKGEKLNIVSAFEAFGKRVNGNISDEDYDGVIRNACPGKGACGGMYTANTMSSAIEAMGMSLPYSSSYPANSPEKLRECGEVNKYMRILLEKDLKPSDIITRKSIENAVTVAIALGGSTNAVMHIIAIARTAGVDFTIEDFKAINAKTPMIGDFKPSGKFMMEDLHEQGGLPAFMKYMLQNGFIHGDCLTVTGKTVAENLENIEPVTPSMVNVIHPLETPIKATGHLCVLSGNLAPEGAVAKITGKEGSSFTGPAHVFDSEQDANDAIRDHKIEKGEVIVIRNIGPKGGPGMPEMLKPTSMIIGAGLGSDVALITDGRFSGGTHGFVVGHVTPEAFSGGPIGLVRNGDIITIDADNLQLSVAISEEEFEERKKTWKRKEISDLQGTLKKYNKLVATASEGCVTDKF

SEQ ID NO: 247 - DNA, 1677 bp, Candidatus Sulcia muelleri
atggcgattaatacatttagtattaaattaactaaaaatagtactttacctgctgcacaagcaatgctgtatgctactgggttaaaagaatatgattttaatcaagctcaagttggcatagttagtaattggtatgaaggtaatccatgtaatattcatttacatattattagtaataatataaaatcatctataaaaaaaaatggaatggtggggtttaaatttaatactataggtattagtgatggtatgtctatgggaacatctggaatgagatattctttaccatcaagagaattaatagctgatagtatagaaagtgttgttaaaactcaacattatgatggattaataggaattccaggatgtgataaaaatatccctggaatagttatggcaatgttacgtattaatagaccttctatattagtatatggaggtagtatatcatcaggatattataatggtaaaaaattaaatatagtttctgcttttgaagctttaggagaaaaaaatataggtaaaatttcagaattagaatataaaaatataattaaacatgcttgtcctggtccaggagcttgtggaggaatgtatacagctaatacaatggcttcttgtcttgaagcaatgggaataacaattccatattcatcttcatcattagctaatagtagctttaaaaaaaaagaatgtattaatataggttattatataaataatatattaaaaaataatattaaaccattggatattattacttataaatctataaaaaatgctataactctagcaatagcattaggaggatcaacaaatttagtaatacatattttagcaatagctaaaactgctaatttagatctaaaattagatgatattcaaaatatcaataataatgttccaattatagctaatttaaaaccaagtggagattttttaatggaagatatacaatctatgggaggaattcctataattataaaatatttattaaaagaaggatatatagaaggagactgtattactgtaacaggaaacacaataaaaaaaaatttagaaaatatacctgatctttcttttaaagaaaaaattatatatcctttattaaatcctataaaaaaaaatgggcatatacgtattttatatggtaatatagccccttatggagctgttgctaaaattactggaaaagaaggtgatattttttcaggatttgcacaagtttttaattcagaaaactctgctaataaagcaataattaataataaaattaaagaaggagatgtaatagtaattagatatgtaggtcccagaggaggtcctggaatgcctgaaatgcttaaacctacttcttacataatgggggctaatttaagtaaaaaaattgctttaataactgatgggagattttcaggaggatctcatggatttgtagtaggtcatattactccagaggctcaaaatggaggattaattgctttaatagaaaatggagatattataataattgatgcaataaagaatactataacattaaaaatatcaaaaaaagaaataaaaaatagaaaaaaaacacccttgcgagtgcgaggtaaagtaaattcaggttatttatataagtatacaaaaactgtatcatctgcttataatggatgtgtaacagataaattgtaa

SEQ ID NO: 248 - protein, 558 aa, Candidatus Sulcia muelleri
MAINTFSIKLTKNSTLPAAQAMLYATGLKEYDFNQAQVGIVSNWYEGNPCNIHLHIISNNIKSSIKKNGMVGFKFNTIGISDGMSMGTSGMRYSLPSRELIADSIESVVKTQHYDGLIGIPGCDKNIPGIVMAMLRINRPSILVYGGSISSGYYNGKKLNIVSAFEALGEKNIGKISELEYKNIIKHACPGPGACGGMYTANTMASCLEAMGITIPYSSSSLANSSFKKKECINIGYYINNILKNNIKPLDIITYKSIKNAITLAIALGGSTNLVIHILAIAKTANLDLKLDDIQNINNNVPIIANLKPSGDFLMEDIQSMGGIPIIIKYLLKEGYIEGDCITVTGNTIKKNLENIPDLSFKEKIIYPLLNPIKKNGHIRILYGNIAPYGAVAKITGKEGDIFSGFAQVFNSENSANKAIINNKIKEGDVIVIRYVGPRGGPGMPEMLKPTSYIMGANLSKKIALITDGRFSGGSHGFVVGHITPEAQNGGLIALIENGDIIIIDAIKNTITLKISKKEIKNRKKTPLRVRGKVNSGYLYKYTKTVSSAYNGCVTDKL

SEQ ID NO: 249 - DNA, 1650 bp, Candidatus Carsonella
atgaaatcaaaattaataacaaaatggccaataaaagcagcaaatagagccatgttgcgtgcagttggatataacgattatgattttaataaatttcaagttggaattgcatcaacttggagtaatataacaccttgtaataatcatatcaatgtattagctaaagcagttgaatatggagtaaattcaaaattttgtaaaggaacaatatttaatacaataacagtatctgatggaatatcaaatggtaattttggaatgaaatattcattactatcaagagatataatttcaaattcaatagaagttgttggcaaagcacaaaattttgatggtattatttctattggaggatgtgacaaaaatattcctggttgtattattggaatgtgtaatttagaaattccttcaatttttatatatggtggtacaattttaccaggcaaaaatagaacagatattgtctctgtttttgaatctttgggtaaattttataataaaactattaatgaaaaagaattgttaaatattgaaaaaaactccattattggatctggatcatgtagtggaatgtatacagcaaattcaatggcaattgttgcagaatgcctaggaattagcttaccaaactcttctattcaaaatgcgcaatcaattaataaaattgttaattgtattaattctggtaaattaataaaaatattgttagaaaataatattacaataaaaaaaattattaataaagaatctattttaaattctataaaagtaatttcattattaggtggatcaacaaattgtttaattcatttattagcaattgctaattgtttaaaaataaatttatctttaaaagatttacaatttgaaactaataacttaccaacgttatctgatttaaaaccaagtggaaaattttttatttcagatttaattaatactggtggaatacaaaaatttttaaaatatttaattgatattaatttaataaatggtaatttattaacggttacaggtaattcattaaaagaaaatttaaaatttattaaaataaattataaaaataaaatactaaaagatatcaataatcctgttaaaaaaactaatcaaatcaaaatattatttggaaacttatcaataaatggttgtatatcaaaaatatcgggtaaagaaggagaaatattctttggaaaagcactagtatttaattcagaagaagaatctgttaattatatttataaaaaaaaaattcaaaataacacaattataattataaggtatgaaggtccaaaaggaggccctggaatgagagaaatgttaactcctacttctgctttaataggagttggaaagaaaaattctgttgctttaataacagatggtagattttcaggtggaagccacggatttgttgtaggacatatttcgccagaagcatatgattttggtacaatttgtttaattaataataatgatctaataataatagatactataaacaattttattagtttatttttaaacaaaagaagcttaaaaagtagattttataaagttaaaatatttaacaaaatagtttcaggtattttaaatttatataaaaaatattcgatttgctcatcgaaaggtgcattattaaattatgaataa

SEQ ID NO: 250 - protein, 549 aa, Candidatus Carsonella
MKSKLITKWPIKAANRAMLRAVGYNDYDFNKFQVGIASTWSNITPCNNHINVLAKAVEYGVNSKFCKGTIFNTITVSDGISNGNFGMKYSLLSRDIISNSIEVVGKAQNFDGIISIGGCDKNIPGCIIGMCNLEIPSIFIYGGTILPGKNRTDIVSVFESLGKFYNKTINEKELLNIEKNSIIGSGSCSGMYTANSMAIVAECLGISLPNSSIQNAQSINKIVNCINSGKLIKILLENNITIKKIINKESILNSIKVISLLGGSTNCLIHLLAIANCLKINLSLKDLQFETNNLPTLSDLKPSGKFFISDLINTGGIQKFLKYLIDINLINGNLLTVTGNSLKENLKFIKINYKNKILKDINNPVKKTNQIKILFGNLSINGCISKISGKEGEIFFGKALVFNSEEESVNYIYKKKIQNNTIIIIRYEGPKGGPGMREMLTPTSALIGVGKKNSVALITDGRFSGGSHGFVVGHISPEAYDFGTICLINNNDLIIIDTINNFISLFLNKRSLKSRFYKVKIFNKIVSGILNLYKKYSICSSKGALLNYE

SEQ ID NO: 251 - DNA, 1674 bp, Synechococcus sp.
atgctccgctccgacgccgtcacgcagggaatctcccgctcccccaaccgcgccatgttgcgtgcggtcggttttggtgacgccgacttcggcaagccgatcatcggcatcgccaacggctacagcaccatcaccccctgcaatgtggggctgaacgatctggcgatgcgagctgaagcgtcagcgcgtcaggccggcggcatgccccaaaccttcggaaccatcaccgtcagcgatggcatttcgatgggcacggaaggaatgaagtactccctggtgagcagggaagtgatcgctgacgcgatcgaaacggcctgcaatggccagagcatggatggggtgctcgctgtcggtggctgcgacaaaaacatgcccggcgccatgctcgcgatggcccgcatgaacatcccgtccatttttgtctatggcggcaccatcaaacccggcaaactcggcggctgtgatctcaccgtggtgagtgcctttgaggccgtaggtcagatcaccagcggcaagattgacgaagaacagctaacggcgattgaaaagaatgcctgccccggtgcaggcagctgtggcggcatgttcaccgccaacaccatgagtgctgcgatcgaaaccctcggtctgagcctgccctacagctccaccatggcggcggaagactccgagaaggctgatagcgcagcccgttcagccgaggtgcttgttgatgccatcaaagccaacattcgcccgcttgatctactcaccaaggaagcgtttgaaaacgccatcagcgtgattatggccgtgggtggctccaccaattcagtgctccacctgctcgccattgcccgcactgccggcgtcgatctgagcatcgacgattttgagcgcatccgtcagcgggtcccggtgatctgtgacctcaaacccagtggccgttttgtcacggttgatcttcatcaggctgggggcattcctcaggtgatgaaattgcttctggatggaggactactccatggcgagtgccgcaccatcgaaggcaaaagcctgaaggaactgttggctgatgtgccttcggttccgcctgctgatcaggaggtcattcgcccactgtccaatcccttgtacgccaaggggcacctggccatcctcaaaggcaacctcgcctcagaaggtgccgtcgcaaagatcagcggtgtgaaaaatccggtgatcaccggtccggcacgggtgttcgaaagcgaagaaacctgccttgccgccatcctcgacaaccaggtcaaggccggtgatgtggtggtcgttcgcaacgaaggcccggtgggtggtcccggcatgcgggaaatgctcagccccacatccgcaattgtgggacagggcctgctcgacaaagtggccctgattaccgacggacgtttctccggtggttcctacggcttggtgatcggccacgtggcgccagaagccgccgtcggtggcaccatcggcctagtgcatgaaggcgacagcatcactgtcgacgccaacaaactgctgattcaactgaacatcgacgaagccgaactggaacgccgccgtaacgcctgggcgcctgcgaccccgaagtaccgcacagggatcctgggcaaatatgcgcgcctggtctcaagttccagccgcggcgccaccaccgacatcgcggactaa

SEQ ID NO: 252 - protein, 557 aa, Synechococcus sp.
MLRSDAVTQGISRSPNRAMLRAVGFGDADFGKPIIGIANGYSTITPCNVGLNDLAMRAEASARQAGGMPQTFGTITVSDGISMGTEGMKYSLVSREVIADAIETACNGQSMDGVLAVGGCDKNMPGAMLAMARMNIPSIFVYGGTIKPGKLGGCDLTVVSAFEAVGQITSGKIDEEQLTAIEKNACPGAGSCGGMFTANTMSAAIETLGLSLPYSSTMAAEDSEKADSAARSAEVLVDAIKANIRPLDLLTKEAFENAISVIMAVGGSTNSVLHLLAIARTAGVDLSIDDFERIRQRVPVICDLKPSGRFVTVDLHQAGGIPQVMKLLLDGGLLHGECRTIEGKSLKELLADVPSVPPADQEVIRPLSNPLYAKGHLAILKGNLASEGAVAKISGVKNPVITGPARVFESEETCLAAILDNQVKAGDVVVVRNEGPVGGPGMREMLSPTSAIVGQGLLDKVALITDGRFSGGSYGLVIGHVAPEAAVGGTIGLVHEGDSITVDANKLLIQLNIDEAELERRRNAWAPATPKYRTGILGKYARLVSSSSRGATTDIAD

SEQ ID NO: 253 - DNA, 1671 bp, Synechococcus sp.
atgctccgctccgatgccgttaccaaggggattcagcgctcacccaatcgggcgatgctgcgagccgtcggtttcggcgatcaggacttcggaaaaccaatcattggcatcgccaacggctacagcacgatcacgccctgcaacgttgggctcgatgatctcgccaggcgtgccgaagaggcggcccgcctagcgggaggtatgcctcaaacgttcgggaccatcaccgtcagcgacgggatctcgatgggaacagagggaatgaaatattccctggtgagccgggaagtgatcgccgacgccatcgaaacagcctgcaatggccagagcatggacggcgtgttggccgtgggcggctgcgacaagaacatgcctggagccatgctcgcgatggcgaggatgaacatcccggcgatcttcgtgtacggcggcaccatcaagcccggaaaactcggcggctgcgacctcaccgtggtcagtgcttttgaagcggtcggtcagatcaccagcggcaagatcgacgaggagcagctcacggccatcgagaaaaatgcctgccccggggctggcagctgcggcggcatgttcaccgccaacaccatgagcgccgccatcgaaacgatgggactcagccttccgcacagctccaccatggctgctgaagatgaagagaaggccgagagcgcagcccgatcggcggaggtgttggtgcaggccatcgaatccggcatccgccccctcgacctgatgacccgtgaggccttcgaaaatgccatcagcgtgatcatggcggtgggtggttccaccaattccgtgctgcatttgctcgccattgcccgcactgctggggtggagctcgccatcgacgactttgaacggatccgccagcgcgttccagtgatctgcgacctcaaacccagtggccgttacgtcacggtggacctccaccgcgccggtggaattccccaggtgatgaaactgctgctggatgccggactcctccacggtgattgccgcaccatcgaaggcaaaaccctgaaggagctgcttgccgatgtgccctccactccgcccgcggatcaggatgtgattcggccgctctccaatcccctttatgccaagggccacctggccatccttaagggcaatctggcttccgaaggagctgtcgcgaagatcagtggtgtgaagaatccggtgatcaccggtccagcaagggtgtttgagagcgaagaaagctgtcttgaagcgattctcgacaatcagatcaaggccggtgatgtggtggtggtgcgcaatgaaggcccggtcggcggaccgggcatgcgcgagatgctcagtcccacgtccgcgatcgtgggacaagggctactcgacaaggtggcgctgatcaccgacggacgcttttcaggtggctcctatggcctcgtgattggccatgtagcccccgaagcggccgtgggcggaaccatcggtttgatcgaggaaggagacagcatcaccgtggacgccaatcagctgctgctgcaactgaatgtggaggaggctgagctggagcggaggcggagtgcatggtcggcaccagtgccgaagtaccgcacggggatcctcggcaaatatgcccggcttgtgagttccagcagccagggtgcggtcaccgaccagccctga

SEQ ID NO: 254 - protein, 556 aa, Synechococcus sp.
MLRSDAVTKGIQRSPNRAMLRAVGFGDQDFGKPIIGIANGYSTITPCNVGLDDLARRAEEAARLAGGMPQTFGTITVSDGISMGTEGMKYSLVSREVIADAIETACNGQSMDGVLAVGGCDKNMPGAMLAMARMNIPAIFVYGGTIKPGKLGGCDLTVVSAFEAVGQITSGKIDEEQLTAIEKNACPGAGSCGGMFTANTMSAAIETMGLSLPHSSTMAAEDEEKAESAARSAEVLVQAIESGIRPLDLMTREAFENAISVIMAVGGSTNSVLHLLAIARTAGVELAIDDFERIRQRVPVICDLKPSGRYVTVDLHRAGGIPQVMKLLLDAGLLHGDCRTIEGKTLKELLADVPSTPPADQDVIRPLSNPLYAKGHLAILKGNLASEGAVAKISGVKNPVITGPARVFESEESCLEAILDNQIKAGDVVVVRNEGPVGGPGMREMLSPTSAIVGQGLLDKVALITDGRFSGGSYGLVIGHVAPEAAVGGTIGLIEEGDSITVDANQLLLQLNVEEAELERRRSAWSAPVPKYRTGILGKYARLVSSSSQGAVTDQP

SEQ ID NO: 255 - DNA, 1674 bp, Synechococcus sp.
atgcttcgctcagacgccgtcactcaaggcattcagcgctcacccaatcgagcaatgctgagagcggttggcttcggtgatgaagatttcggcaagcccattatcgggatcgctaacggttacagcacgattacaccttgcaatgtgggattgaatggtctgtcccgtcgtgccgaagattcggctcgaaaggcaggtggaatgcctcagactttcggaaccatcaccgtcagcgatggcatctcgatgggcacggaaggaatgaaatattccttggtgagccgtgaagtgattgctgatgcaattgaaacggcctgcaatgggcaaagtatggatggcgttctggcggttggtggttgcgataaaaatatgcctggcgccatgttggcgatggcacgtatgaatatcccctcgatttttgtgtacgggggaacaattaagccgggaaaattaggtggctgtgacctcactgttgtgagtgcttttgaggctgtcggtcagattacgagtgggaaaattgatgaagagcagctaactgcgattgaaaaaaatgcctgcccaggtgctggcagctgtggaggcatgttcacggccaatacgatgagtgctgcgattgaaacgatggggctgagtcttccccacagttcaacgatggctgccgaagatgaggaaaaagcagagagtgcggctcgttctggtgaagtcctcgttgaggcaattaaatccaatattcgcccccttgatttgctcacgcgggaagcctttgaaaatgccatcagcgtgatcatggcggtgggcggctccaccaactctgtgttgcatttgcttgctatcgcgcgcacagcaggcgtggatctcagcatcgacgactttgaacagatccgccaacgcgttccggtgatttgtgatctaaaaccgagtggtcgttttgtcaccgtggatcttcatcaggctgggggcattccacaggtgatgaaattgcttttagatgcgggcttgctccatggcgattgccgcacgattgaagggaaaacattgaaagaattgttggctgatattccttcaacgcctcctgaaggacaagaagtgattaggccgttaagtaaccccctttatgccaaagggcatttggccattctgaaaggaaatttggcaagcgaaggagctgtcgccaaaatcagcggcatcaaaacgcctgtcctcacaggtcctgctcgcgtttttgaaagcgaagaggattgtttagcgtcgattattggtaaacatattcatgctggtgatgtcatcgtgattcgccaggaaggtccagtgggaggtcctggaatgcgcgaaatgcttgcaccaactgctgccattgttgggcagggactcggtgacaaggtggcgctgattacggatggtcgattcagtggtggaacctatggtttggtggttggccacgtggctccagaagctgccgttggtggagcaatcggccttgttatggaaggagacagcatcactgtggatgccaatcaaaaccttcttcaactcaatgtgaatgaggctgaactcgaaacacgccgccgcacttggtcaggacataagcctagatacaagactggaattcttggcaaatatgctcgacttgtctcgagttctagtcgtggtgccgtgacagatcagcctgattaa

SEQ ID NO: 256 - protein, 557 aa, Synechococcus sp.
MLRSDAVTQGIQRSPNRAMLRAVGFGDEDFGKPIIGIANGYSTITPCNVGLNGLSRRAEDSARKAGGMPQTFGTITVSDGISMGTEGMKYSLVSREVIADAIETACNGQSMDGVLAVGGCDKNMPGAMLAMARMNIPSIFVYGGTIKPGKLGGCDLTVVSAFEAVGQITSGKIDEEQLTAIEKNACPGAGSCGGMFTANTMSAAIETMGLSLPHSSTMAAEDEEKAESAARSGEVLVEAIKSNIRPLDLLTREAFENAISVIMAVGGSTNSVLHLLAIARTAGVDLSIDDFEQIRQRVPVICDLKPSGRFVTVDLHQAGGIPQVMKLLLDAGLLHGDCRTIEGKTLKELLADIPSTPPEGQEVIRPLSNPLYAKGHLAILKGNLASEGAVAKISGIKTPVLTGPARVFESEEDCLASIIGKHIHAGDVIVIRQEGPVGGPGMREMLAPTAAIVGQGLGDKVALITDGRFSGGTYGLVVGHVAPEAAVGGAIGLVMEGDSITVDANQNLLQLNVNEAELETRRRTWSGHKPRYKTGILGKYARLVSSSSRGAVTDQPD

SEQ ID NO: 257 - DNA, 1674 bp, Synechococcus sp.
atgcttcgctccgacgccgtcaccaaggggatccagcggtctcccaaccgcgccatgttgcgggccgtgggctttggagacagtgatttcggcaagcccatcctgggcattgccaacggctacagcactatcaccccctgcaatatcgggctgaacgacctggccaaacgggctgaggaagcagcccgccaggccggaggcatgccccagatgtttggaaccatcaccgtgagtgatggaatctccatgggcactgaagggatgaagtactccctggtgagccgtgaagtgattgctgacgccatcgaaacggcctgcaacggtcagagcatggatggggtgctggccgttggtggctgcgacaagaacatgcctggcgccatgctggccatggctcggatgaacattccttcggttttcgtctacggcggcacgatcaagccgggcaagctcgggggctgtgatctcacggtggtgagcgcttttgaggcggtggggcaactcaccagcggcaagatcgacgaagtgcagctcaccgcagttgagaaaaatgcctgccctggggctggcagttgcggcggcatgttcaccgccaacaccatgagtgccgccatcgaaacgatggggctgagccttccctacagctccacgatggcagccgaggacgaggaaaaggccgacagtgccgctcgctccgctgaggtgctggtggaggcagtgaaagccaacattcgccctctggacctgctcaccaaggaagcctttgagaacgccattagcgtgatcatggcggtgggtggctccaccaatgcggtactgcacctgctggccattgcccgtaccgccggcgtcgacctgagcatcgatgacttcgaacggatccgtcagcgggtgccggtgatctgtgatctcaagcccagcggccgctacgtgaccgttgatctgcacaacgccggcggcattccccaggtgatgaagctgctgctggatgctggcttgctgcacagcgactgccgaaccgtggaaggcaaaagcctgaaggagttgctggccgatgtgccgtcggagccccccgccgggcaggaggtgatccgccccctcagcaatccgctgtacgccaaaggtcacctcgccatccttaagggcaacctcgccagcgagggaagcgtggccaagatcagcggcgtgaaaacccctgtgctcactggccctgcgcgggtgtttgaaagcgaggaagactgccttgccgccatcctcgataaaaagatccaggccggggatgtggtggtggtccgcaacgagggtcccgttggtggaccgggcatgcgggaaatgctggctccaacttcagcgattgttggtcagggcctgggggacaaggtcgccctgatcaccgatggccgctttagcggcggcacctatggcctggtggtgggtcatgtggctcctgaagctgctgttggtggaacgatcggcctggtgcaagaaggcgacagcatcacggttgatgctgatcagctgctgctccaactcaacgtggatcaagcggaactggatcgccgtcgtgcgggatggagcaagccggaaccgcgttaccgcagcggaattctcggcaagtacgcgcggctcgtctccagctcaagccggggtgcaaccaccgaccacgccgactga

SEQ ID NO: 258 - protein, 557 aa, Synechococcus sp.
MLRSDAVTKGIQRSPNRAMLRAVGFGDSDFGKPILGIANGYSTITPCNIGLNDLAKRAEEAARQAGGMPQMFGTITVSDGISMGTEGMKYSLVSREVIADAIETACNGQSMDGVLAVGGCDKNMPGAMLAMARMNIPSVFVYGGTIKPGKLGGCDLTVVSAFEAVGQLTSGKIDEVQLTAVEKNACPGAGSCGGMFTANTMSAAIETMGLSLPYSSTMAAEDEEKADSAARSAEVLVEAVKANIRPLDLLTKEAFENAISVIMAVGGSTNAVLHLLAIARTAGVDLSIDDFERIRQRVPVICDLKPSGRYVTVDLHNAGGIPQVMKLLLDAGLLHSDCRTVEGKSLKELLADVPSEPPAGQEVIRPLSNPLYAKGHLAILKGNLASEGSVAKISGVKTPVLTGPARVFESEEDCLAAILDKKIQAGDVVVVRNEGPVGGPGMREMLAPTSAIVGQGLGDKVALITDGRFSGGTYGLVVGHVAPEAAVGGTIGLVQEGDSITVDADQLLLQLNVDQAELDRRRAGWSKPEPRYRSGILGKYARLVSSSSRGATTDHAD

SEQ ID NO: 259 - DNA, 1674 bp, Synechococcus sp.
atgcttcgttccgacgccgtcacaaaggggatccagcgttcccccaaccgcgccatgctccgtgcggtgggattcggagatgaggacttcggcaagccgattctcgggatcgccaacggctacagcacgatcacaccctgcaatgtcgggttgaacgacctgtcccggcgcgctgaagaggctgcccgtcaggccggcggcatgccacagatgttcggaaccatcacggtgagtgatggcatctccatgggcaccgaagggatgaagtactccctggtaagccgtgaggtgatcgccgatgcgattgaaaccgcctgcaatggccagagcatggatggcgtgctggcggtgggcggctgcgacaagaacatgcccggcgccatgttggccatggcgcggatgaacattccggctgtgttcgtttacggcggcacgatcaagccggggaaactcggcggctgtgatctcaccgtggtcagcgcctttgaggcagttggtcagctcaccagcggcaacatcgacgaagaccagctcaccgctgtcgaaaagaacgcttgcccaggagccggcagctgcggcggcatgttcaccgccaacacgatgagtgcagccatcgaaacgatggggttgagcctgccctacagctcaacgatggcggcagaagacgaagagaaggccgacaatgccgctcgttcagcagaggtgttgttggacgcggtgaaggccaacattcgacccttggatctgctcaccaacgatgcattcgagaacgccatcagcgtgatcatggcggtgggtggatccaccaacgccgtgctgcacctgctggcgatcgcccgtacggctggggtctccctcagcatcgacgacttcgagcggatccgtcagcgcgtgccggtgatctgtgacctcaagccgagcggccgctacgtgacggtggatctccacaacgctggcggtatcccccaggtgatgagactgctgctcgatgccgggctgctgcatggcgattgccgcaccgttgagggcaaaagcctgcgtgaggtgctggcggatgtgccctccgtgccaccggccgatcaagacgtgatccgtccactgagcaatcccctttacggcaaaggccacctggccatcctcaagggcaacctggccagtgagggcagtgtggccaagatcagcggcgtcaagacaccagtgctcaccggccccgcccgggtatttgagagcgaggaagactgcctcgccgccatcctggatcaacggatcaaggccggcgatgtggtggtggtgcgcaatgaggggcccgtgggaggtccgggcatgcgcgaaatgctggcccctacctccgccatcgtcgggcaaggcctgggagacagggtggctctgatcaccgatggccgcttcagcggcggcacctatggcctggtggtcggtcacgttgcccccgaagccgctgtcggcggaaccatcggcctggtgcagggaggcgacagcatcaccgtggatgccgaccagttgctgctgcaactcaacgtggatgaggcggaactcacgcgacgccgggcagcctggagcaagccggaaccccgttatcgcactgggattctgggcaagtacgcccgtctggtgtccagttcaagccgtggagcggtcaccgaccagcccgactga

SEQ ID NO: 260 - protein, 557 aa, Synechococcus sp.
MLRSDAVTKGIQRSPNRAMLRAVGFGDEDFGKPILGIANGYSTITPCNVGLNDLSRRAEEAARQAGGMPQMFGTITVSDGISMGTEGMKYSLVSREVIADAIETACNGQSMDGVLAVGGCDKNMPGAMLAMARMNIPAVFVYGGTIKPGKLGGCDLTVVSAFEAVGQLTSGNIDEDQLTAVEKNACPGAGSCGGMFTANTMSAAIETMGLSLPYSSTMAAEDEEKADNAARSAEVLLDAVKANIRPLDLLTNDAFENAISVIMAVGGSTNAVLHLLAIARTAGVSLSIDDFERIRQRVPVICDLKPSGRYVTVDLHNAGGIPQVMRLLLDAGLLHGDCRTVEGKSLREVLADVPSVPPADQDVIRPLSNPLYGKGHLAILKGNLASEGSVAKISGVKTPVLTGPARVFESEEDCLAAILDQRIKAGDVVVVRNEGPVGGPGMREMLAPTSAIVGQGLGDRVALITDGRFSGGTYGLVVGHVAPEAAVGGTIGLVQGGDSITVDADQLLLQLNVDEAELTRRRAAWSKPEPRYRTGILGKYARLVSSSSRGAVTDQPD

SEQ ID NO: 261 - DNA, 1674 bp, Synechococcus sp.
atgctcagatccgacgccgttaccaaagggattcagcgatcccccaaccgcgccatgctccgggccgttggttttggtgatgctgatttcggcaaaccgatcctgggaatcgccaacggctacagcacgattacgccctgcaatatcgggcttgatgttttagcgaaacgtgccgaagaagcggcccgtctggctggaggaatgccgcaaatgtttggcaccatcacggtgagtgatggaatctcgatggggactgaagggatgaaatattcccttgtcagccgagaagtcatcgccgatgccatcgaaacggcctgtaacggtcagagcatggatggagtcttggcagttggtggctgcgacaaaaatatgcctggtgcgatgttggccatggcacggatgaatatcccctccgtgtttgtttatgggggaacgatcaagccgggaaaactcggcggctgtgatctcactgtggtgagtgcctttgaagccgttggtcaaatcaccagcggcaaaatcgatgaagaacaactcacggcggtggaaaagaacgcctgtcctggtgcaggaagttgcggcggcatgtttaccgccaacacgatgagtgcagccatcgaaacgatggggttaagccttccttacagctccacgatggcggccgaagaccaggaaaaagcggacagcgcggctcgctcagcagaggtgttggtggatgccgtgaaagccaacatccggccgctcgatctgctcacaaaacaagccttcgaaaacgccatcagcgtgatcatggcggtcggcggttccaccaatgccgttttgcatttgctggcgattgctcgcacagctggggttgatttgagcattgacgactttgaacgcattcggcaacgcgtcccagtgatctgcgatctcaaacccagcggtcggtttgtcaccgttgatctgcacaacgctggaggaatccctcaagtgatgaagttgctgcttgatgccggattgctccacggcgattgccaaacagttgaagggaaaagtctcaacgcattgttggcggatgtgccatctgcaccccccgcagaccaagaggtgattcgacctctgagcaatccgatgtacagcaaaggacaccttgccatcctcaaaggaaatttggccctggagggcagtgtggccaagatcagcggcgtcaaaactcctgtactgacgggtccagctcgggtttttgaaagtgaggaagactgtctggcctccatccttgagaaaaggatcaatgcgggagacgtcgttgtgatccgctacgaaggtccggtcggtggacctggcatgcgggaaatgttggcgcccacctcagccatcgtcggccagggactcggcgacaaagtggcattaattaccgatggacgatttagcggtggtacctacggactcgtggtgggtcacgtcgctccagaagccgctgttggtggaacgattggccttgtgcaagagggagacagcatcaccgtggatgccaatcaactcttgcttcagctcaatgttgacgacacggaattagccaaacgacgagcagcatggtcgaaaccaaaacctcaatacaccactggaattttgggtaaatatgcccgactcgtttccacatccagcaaaggggctgtcaccgatcaaccggattaa

SEQ ID NO: 262 - protein, 557 aa, Synechococcus sp.
MLRSDAVTKGIQRSPNRAMLRAVGFGDADFGKPILGIANGYSTITPCNIGLDVLAKRAEEAARLAGGMPQMFGTITVSDGISMGTEGMKYSLVSREVIADAIETACNGQSMDGVLAVGGCDKNMPGAMLAMARMNIPSVFVYGGTIKPGKLGGCDLTVVSAFEAVGQITSGKIDEEQLTAVEKNACPGAGSCGGMFTANTMSAAIETMGLSLPYSSTMAAEDQEKADSAARSAEVLVDAVKANIRPLDLLTKQAFENAISVIMAVGGSTNAVLHLLAIARTAGVDLSIDDFERIRQRVPVICDLKPSGRFVTVDLHNAGGIPQVMKLLLDAGLLHGDCQTVEGKSLNALLADVPSAPPADQEVIRPLSNPMYSKGHLAILKGNLALEGSVAKISGVKTPVLTGPARVFESEEDCLASILEKRINAGDVVVIRYEGPVGGPGMREMLAPTSAIVGQGLGDKVALITDGRFSGGTYGLVVGHVAPEAAVGGTIGLVQEGDSITVDANQLLLQLNVDDTELAKRRAAWSKPKPQYTTGILGKYARLVSTSSKGAVTDQPD

SEQ ID NO: 263 - DNA, 1677 bp, Synechococcus sp.
atggcccccctccgatccagcgccatcacgcaaggtgttcagcgcagtcccaaccgcgccatgttgcgcgctgttggtttcggagatggtgacttcagcaaaccgatcatcgggattgccaacggttacagcaccatcacgccctgcaatgtggggctcaacgatctagccctgcgcgccgaagcagccacacaagcagccggggggatgccgcaactcttcggcaccatcaccgtgagtgatggcatctccatgggcaccgaggggatgaagtactccctggtgagccgcgaagtgattgccgatgccatcgagaccgcctgcaacggtcaaagcatggatggcgtattggccatcggcggctgcgacaaaaacatgcccgccgccatgttggcgatggcgcggatgaacatcccaggtgtcttcgtctatggcggcaccatcaagcccggcaaattgggcggctgcgacctcaccgtggtcagcgcctttgaagcggttggtcagttgagcagcggcaagatcgatgaagcccagctcaccgctgttgaaaagaacgcttgcccaggagctggcagctgtggtggcatgttcacggccaacacgatgagtgcggccatcgaaacgatggggttgagcttgccgttcagctccaccatggcggcggaagatcccgagaaagccgagagcgctgctcgctcggctgaggtgttggtggaggccattgctgccaacattcgtccgttggatctgctgacccgcgaagcgtttgaaaacgccatcagcgtgatcatggccgtgggtggctccaccaatgcggtgttgcacttgctcgcgattgcacgcaccgccggcgtaccactgtcaatcgacgacttcgaaacgattcggcaacgggtgcctgtgatctgcgatctcaaaccaagcggacgctttgtaacggtcgacctgcacaacgctggtggcattccgcaagtcatgaaacttctgctcgatggtgggttgctccatggcgattgccgcaccgtggagggcaaaaccttgcgagaggttctggctgatgttccctcagaaccgccggctgatcaggaggtgatccggcccctgagcaatcccctctatgccaaagggcacctggctgtgttgaaaggcaacctcgccagtgaaggggctgtcgccaagatcagtggtgtcaaaacaccagtgctcacaggcccagccagggtgtttgaaagcgaagagcagtgcctgcaggcgatcttggcgaaccaggttcacgcaggtgatgtggtggtggtgcgcaatgaaggccccgttggtggcccgggaatgcgggagatgttggcgcccaccgccgccatcgttggtgaagggctcggcgacaaggtggcgttgatcaccgacggtcgcttcagcggcggcacctacggcctggtggttgggcatgtggccccagaagcagccgtaggcggcatgatcggcctggtgcaagagggcgattccatcaccgtggatgcccaacaacaattgctgcagctcaatgtggatgccgctgaattggagcggcgcaagcaagcgtgggtcaaaccagaaccgcgttaccgcaccggtgttttgggtaaatacgcccgtttggtgagcagcagcagcaagggcgctgtgactgatcaaccctga

SEQ ID NO: 264 - protein, 558 aa, Synechococcus sp.
MAPLRSSAITQGVQRSPNRAMLRAVGFGDGDFSKPIIGIANGYSTITPCNVGLNDLALRAEAATQAAGGMPQLFGTITVSDGISMGTEGMKYSLVSREVIADAIETACNGQSMDGVLAIGGCDKNMPAAMLAMARMNIPGVFVYGGTIKPGKLGGCDLTVVSAFEAVGQLSSGKIDEAQLTAVEKNACPGAGSCGGMFTANTMSAAIETMGLSLPFSSTMAAEDPEKAESAARSAEVLVEAIAANIRPLDLLTREAFENAISVIMAVGGSTNAVLHLLAIARTAGVPLSIDDFETIRQRVPVICDLKPSGRFVTVDLHNAGGIPQVMKLLLDGGLLHGDCRTVEGKTLREVLADVPSEPPADQEVIRPLSNPLYAKGHLAVLKGNLASEGAVAKISGVKTPVLTGPARVFESEEQCLQAILANQVHAGDVVVVRNEGPVGGPGMREMLAPTAAIVGEGLGDKVALITDGRFSGGTYGLVVGHVAPEAAVGGMIGLVQEGDSITVDAQQQLLQLNVDAAELERRKQAWVKPEPRYRTGVLGKYARLVSSSSKGAVTDQP

SEQ ID NO: 265 - DNA, 1671 bp, Synechococcus sp.
atgctccgctccgccgcgatcacccaggggattcagcgctctccgaatcgagccatgctccgtgctgtgggtttcggcgacggcgacttcaacaagccgatcatcggcatcgccaacggctacagcaccatcaccccctgcaatctggggctcaatgatcttgctcgacgcgccgaggaagccgcccatcaggtgggagcgatgccccagatgttcggcaccatcaccgtgagcgatgggatttcgatggggaccgaagggatgaaatattcccttgtgagccgggaggtgattgccgattcgatcgaaacggtcgtcaacgggcaaagcatggatgccctgctggcgatcggtggctgtgacaagaacatgcctggtgccatgctggcgatggcgaggatgaacgtcccctcgatcttcgtgtatggcggcaccatcaagcctggcaagctcggtgcctgtgacctcaccgtggtgagtgcctttgaggcggtgggccagttcagtggcggcaagatcgaggagcaggaactcacggcgatcgagaaaaacgcctgccctggggcgggcagctgcgggggcatgtttactgccaacaccatgagtgccgccttcgaggtgctggggctgagcttgccctacagctccacgatggcggccgaagaccccgagaaggccgatagcgccgcccgtagtgccgaggttttggccgacgccatcgaggcccagatcctcccgcgcgatctgatgacgcgcgaagccttcgaaaacgccatcagtgtgatcatggccgtgggtggctccaccaactccgtgctgcatctgctggctgtcgcccgcacggcgggggtggcgctgagcattgacgacttcgagcggatccggcagcgcgtgccggtgatctgtgatctcaagccaagtggccgcttcgtgacggtggatctgcaccgggctgggggcattccccaggtgatgaaactactgctcgatgcagggctcttgcacggcgactgccgcacgatcgaaggcaagacccttcacgaggtgctcgccgctgtgccgtcggtcccccccgccggccaggaggtgattcggcccctgagccatccgctgtatgccaaggggcacctggcgatcctcaaaggcaacctggccgaggaaggcgcggtggccaagatcagcggcgtcaaaaacccggtcatcaccggccctgcccgcgtgttcgagagcgaagaaacctgcctggccgccattctcgacaagcagatcaaccccggcgatgtggtggtcgtgcgcaatgaggggccggtgggcggtcctggcatgcgggagatgctcagccccacctccgcgatcgtgggccaggggctgctcgacaaggtggctctgatcaccgatggccgcttctcaggcggttcctacggcctggtgatcggccacgtggctccggaggccgccgtggggggcacaatcggcctggtgcaggaaggcgacagcatcaccgtggatgcgaatcagctgctgattcaactcaacgtggatgaatccgagctagctcaacgtcgcgccgcctggacccaacccgaaccccggtatcgcaccggcatcctcggcaaatacgcccgacaggtgagctccagcagtgtgggggcggtgaccgatcagccctga

SEQ ID NO: 266 - protein, 556 aa, Synechococcus sp.
MLRSAAITQGIQRSPNRAMLRAVGFGDGDFNKPIIGIANGYSTITPCNLGLNDLARRAEEAAHQVGAMPQMFGTITVSDGISMGTEGMKYSLVSREVIADSIETVVNGQSMDALLAIGGCDKNMPGAMLAMARMNVPSIFVYGGTIKPGKLGACDLTVVSAFEAVGQFSGGKIEEQELTAIEKNACPGAGSCGGMFTANTMSAAFEVLGLSLPYSSTMAAEDPEKADSAARSAEVLADAIEAQILPRDLMTREAFENAISVIMAVGGSTNSVLHLLAVARTAGVALSIDDFERIRQRVPVICDLKPSGRFVTVDLHRAGGIPQVMKLLLDAGLLHGDCRTIEGKTLHEVLAAVPSVPPAGQEVIRPLSHPLYAKGHLAILKGNLAEEGAVAKISGVKNPVITGPARVFESEETCLAAILDKQINPGDVVVVRNEGPVGGPGMREMLSPTSAIVGQGLLDKVALITDGRFSGGSYGLVIGHVAPEAAVGGTIGLVQEGDSITVDANQLLIQLNVDESELAQRRAAWTQPEPRYRTGILGKYARQVSSSSVGAVTDQP

SEQ ID NO: 267 - DNA, 1617 bp, Synechococcus sp.
atgttgcgggccgtgggcttcggcgacggtgacttcaacaagccgatcatcggcatcgccaatggctacagcacgatcacgccctgcaacatcggcctgaacgatctggcccgctgcgccgaggagtctgcccgtctggctggggccatgccacagatgttcggcacgatcaccgtcagcgacgggatctcgatgggcaccgaggggatgaagtattccctggtgagccgggaggtgatcgctgattcgatcgaaaccgcctgcaacgcccagagcatggatggcctgctggccatcggcggctgcgataagaacatgcccggcgccatgctggcgatggcgcgcatgaacatcccggcgatcttcgtgtacggcggcacgatcaaacccggccggctcggcccctgcgacctcaccgtggtgagtgccttcgaggctgttggtcagttctcgggcggtcgcatcgatgaggaggaactgctggcgatcgagaagaacgcctgccccggcgccggcagctgcggcggcatgttcaccgccaacacgatgagttcggcgttcgaagcgatgggcctgagcctgccgggcagctccaccatgacggccgaggatccggagaaggccgagagcgctgcccgctccgccgaggtgctggtgcgggccatcgaggcgaacatccgcccccgtgatctgatcacccgcgaggcgatcgagaacgccatcagcgtgatcatggcggtgggggggtccaccaattcggtgctgcacctgctggcgatcgcccgcaccgccgaggtgccgctcacgatcgacgatttcgagacgatccgtcagcgggtgccggtgatctgcgatctcaagcccagcggccgtttcgtgacggtggatctgcaccgggccggcggcattccccaggtgatgaagctgctgctggatgccggcctgctgcacggcgattgccgcaccatcgaaggcctcacgctcaagcaggtgctggcggaggtgcccagcgagccccccgccgatcaggacgtgatccggcccctctccaatccgctctatgccaagggtcacctggcgatcctcaagggcaacctggccgaggaaggggccgtcgccaagatcagtggcgtcaagaccccggtgatcacggggccggcccgggtgttcgagagtgaggagagcgccctggaggcgatcctcgccggtgaggtccatgccggtgatgtggtggtggtgcgctacgagggcccggtgggcgggcccggcatgcgtgagatgctctcgcccacggccgcgatcgtgggccagggcctgggggaatcggtggcgctgatcaccgacggtcgcttcagcgggggctcctacggcctggtggtgggccatgtggcccccgaggccgccgtgggcggcaccatcgccctggtgcaggagggcgacagcatcaccgttgatgcccatcagctgctcatccagctcaatgtggaaaccagcgagctggagcggcgccgggcggcctgggtcaggcccgaaccgcgctaccgcactggagtgctgggcaagtacgcccggctggtgagcagcagcagcctgggggcggtcaccgatcagggttga

SEQ ID NO: 268 - protein, 538 aa, Synechococcus sp.
MLRAVGFGDGDFNKPIIGIANGYSTITPCNIGLNDLARCAEESARLAGAMPQMFGTITVSDGISMGTEGMKYSLVSREVIADSIETACNAQSMDGLLAIGGCDKNMPGAMLAMARMNIPAIFVYGGTIKPGRLGPCDLTVVSAFEAVGQFSGGRIDEEELLAIEKNACPGAGSCGGMFTANTMSSAFEAMGLSLPGSSTMTAEDPEKAESAARSAEVLVRAIEANIRPRDLITREAIENAISVIMAVGGSTNSVLHLLAIARTAEVPLTIDDFETIRQRVPVICDLKPSGRFVTVDLHRAGGIPQVMKLLLDAGLLHGDCRTIEGLTLKQVLAEVPSEPPADQDVIRPLSNPLYAKGHLAILKGNLAEEGAVAKISGVKTPVITGPARVFESEESALEAILAGEVHAGDVVVVRYEGPVGGPGMREMLSPTAAIVGQGLGESVALITDGRFSGGSYGLVVGHVAPEAAVGGTIALVQEGDSITVDAHQLLIQLNVETSELERRRAAWVRPEPRYRTGVLGKYARLVSSSSLGAVTDQG

SEQ ID NO: 269 - DNA, 1671 bp, Prochlorococcus marinus
atgctcagatccgccgccatcacaaagggaactcaacgctctcccaaccgagccatgcttcgcgcagtgggctttggcgacgaagacttcaataaaccaatcatcggtatagccaacggctacagcacgatcactccttgcaacatcggtcttaatgacctggcgcgacgttcagaagaagcagcccgccaggccggtgcaatgccccagatgttcggcaccatcactgtcagtgatggcatctctatgggcaccgaagggatgaaatattccctggtaagtcgcgaggtgattgctgattcgatcgagacagcctgcaacgcccaaagcatggacggcgtactagcaatcggtggctgtgacaaaaacatgcctggagcgatgatcgccctggcccgaatgaacatcccaggtgtctttgtctatggcggaacgatcaaaccaggaaaattggctgaccgcgacctcactgtagtcagcgcctttgaagctgttggtcagcatgccagtggcaagataaatgaggagcaactcaccgctatcgagaagaacgcttgcccaggagcaggaagttgcggtggcatgtttacagccaacacgatgtcagccgctattgaaacattgggattgagtttgccttacagctcaacgatggctgcagaggatgaggaaaaagcaaatagcgcagcccgtagtgctgaagtgcttgtggatgccattaaggcaaatatctgtccccgcgatctactcaccaagaacgcatttgaaaacgcgattagcgttgtcatggcagtgggcggctccaccaatgcagttctgcatctgcttgcgattgcccgtagcgcaggcgtagacctttgcatcgatgacttcgagcgcatccgccagcgtgtaccggtgatttgtgatctaaaacccagcggccgttacgtgactgttgatttgcataacgcaggcggcattccccaagtgatgaaacagttgcttgatgcaggcttacttcatggagactgccgcaatgtggaaggtaaaaccttgagagaactgctcaaggatgtgccatccgagccttcagcagagcaagacgtcattcatcccctctcgaaaccggtctatgccaaggggcacctggcgatccttaaaggcaatctggccagcgaaggatgcgtggccaagataagcgggatcaaaaccccagtacttactggacctgcaagggtttttgaaagcgaggaggcctgccttgctgccattctcaacaacaaggtgaaggcgggagatgtcgtcgtcatacgtaacgaaggcccggttggcgggcctggaatgcgagagatgcttgctcctacatctgccatcgtcggtgaagaccttggcgacaaggtggccttaatcacagatggacgcttcagcggaggtacctatggtttggtggtgggccatgtggcaccggaagcagccgtaggcggcatgattggccttgtgcaggaaggcgacagcatcaccatcgatgccaatcaactgctgatccaactcaatgtcgagaaggatgaattggagcgtcgctccagcgcatgggaaaaaacacagccgcgttatcaaacaggagttctcggtaaatacgcccgaatggtgagtagcgccagcaatggtgctgtcaccgaccagccctga

SEQ ID NO: 270 - protein, 556 aa, Prochlorococcus marinus
MLRSAAITKGTQRSPNRAMLRAVGFGDEDFNKPIIGIANGYSTITPCNIGLNDLARRSEEAARQAGAMPQMFGTITVSDGISMGTEGMKYSLVSREVIADSIETACNAQSMDGVLAIGGCDKNMPGAMIALARMNIPGVFVYGGTIKPGKLADRDLTVVSAFEAVGQHASGKINEEQLTAIEKNACPGAGSCGGMFTANTMSAAIETLGLSLPYSSTMAAEDEEKANSAARSAEVLVDAIKANICPRDLLTKNAFENAISVVMAVGGSTNAVLHLLAIARSAGVDLCIDDFERIRQRVPVICDLKPSGRYVTVDLHNAGGIPQVMKQLLDAGLLHGDCRNVEGKTLRELLKDVPSEPSAEQDVIHPLSKPVYAKGHLAILKGNLASEGCVAKISGIKTPVLTGPARVFESEEACLAAILNNKVKAGDVVVIRNEGPVGGPGMREMLAPTSAIVGEDLGDKVALITDGRFSGGTYGLVVGHVAPEAAVGGMIGLVQEGDSITIDANQLLIQLNVEKDELERRSSAWEKTQPRYQTGVLGKYARMVSSASNGAVTDQP

SEQ ID NO: 271 - DNA, 1671 bp, Prochlorococcus marinus
atgcttagatcaaatgcaataacacagggtattcaacgatcaccaaaccgagcaatgcttagagctgttgggtttgatgataatgattttaacaagccaatcattggaatagctaatgggcacagcacaataaccccatgcaatatgggattaatggatttagctaatagagcagagtcagcgttaaaagaggctggtgcaatgcctcaaactttcggaaccataactgttagtgacggcatttccatgggaacggaagggatgaaatactcattagtttcaagagaagttattgcagattcaatcgagacggcttgcaatgctcaaagcatggatggggtgttagcgataggtggatgcgataaaaatatgccaggagcaatgttatcaatggcaagaatgaacataccttcgatttttgtttatggggggacaattaaacctgggaaattagacggttgcgacttgaccgtggtgagttcatttgaggctgtcggtcaattagcaagcggaaaaatcgacaaagatcgtttaatagctgtagaaaaaaatgctatccctggaccaggcagttgcggagggatgtttactgctaataccatgtctgcggcaatagaaacgatgggttttagtttgccatttagttcaacaatggctgcagtagatgatgaaaaagcagaaagcgctgctgaaagtgctcaggtccttgtaaatgcagtaaagaataacatcaggccattagatttacttacgaaagaagcctttgagaatgcaatcagtgtcatcatggctgtaggcggctcaacaaattctgtccttcacctacttgctatagctaggactgcaggagttgatttaacgatcgatgactttgaacgtataaggcagactgttcctgtgatttgcgacctcaaaccaagcggtaaatacgtaacagtcgacctacataaagctggtgggattcctcaagtaatgaaattactcctcgatgcaggaatgctacatggagaatgcaaaaccattgaaggaaaaacaattaaagaagttcttagagatatcccctcaaagcccaaagaaaatcaagacgttataagacaaatatcaaaccctatttataaaaaaggacatcttgctattctcaaaggaaatttagcaagtgaaggaagtgtcgcaaaaattagtggtgtaaagactcccgttttaaccgggcctgcaagggtctttgagagtgaagaagaatgcttaactgccattcttgacaataaagtaaaagctggagatgtagtcgtcgttaggtatgaaggacctgtaggagggcctgggatgagggagatgctctctccaacctcagcgattgtaggtcaaggtttaggagagaaagttgcactaattactgatggtcgatttagtggaggatcatatggattagtggttggccacgttgctccagaagcagccgtcggaggaacaattggattagtagaggaaggagacagtattaccgttgacgctaataaattgttaattcaattaaatgtcgaagagcgagaactagctagaagaaaacagaaatgggagaagccaaagcctagatataagacaggcattcttgggaagtattccagattagtaagttcatcaagccaaggagcgacaactgatcaaatataa

SEQ ID NO: 272 - protein, 556 aa, Prochlorococcus marinus
MLRSNAITQGIQRSPNRAMLRAVGFDDNDFNKPIIGIANGHSTITPCNMGLMDLANRAESALKEAGAMPQTFGTITVSDGISMGTEGMKYSLVSREVIADSIETACNAQSMDGVLAIGGCDKNMPGAMLSMARMNIPSIFVYGGTIKPGKLDGCDLTVVSSFEAVGQLASGKIDKDRLIAVEKNAIPGPGSCGGMFTANTMSAAIETMGFSLPFSSTMAAVDDEKAESAAESAQVLVNAVKNNIRPLDLLTKEAFENAISVIMAVGGSTNSVLHLLAIARTAGVDLTIDDFERIRQTVPVICDLKPSGKYVTVDLHKAGGIPQVMKLLLDAGMLHGECKTIEGKTIKEVLRDIPSKPKENQDVIRQISNPIYKKGHLAILKGNLASEGSVAKISGVKTPVLTGPARVFESEEECLTAILDNKVKAGDVVVVRYEGPVGGPGMREMLSPTSAIVGQGLGEKVALITDGRFSGGSYGLVVGHVAPEAAVGGTIGLVEEGDSITVDANKLLIQLNVEERELARRKQKWEKPKPRYKTGILGKYSRLVSSSSQGATTDQI

SEQ ID NO: 273 - DNA, 1674 bp, Prochlorococcus marinus
atgaataaacttagatcatctgctattacccaaggtgtgcaaaggtcacctaacagatcaatgttaagggcagttggttttaatgatgaagattttaacaaacctattattggggttgccaatggttacagcacaataaccccatgcaatatagggttaaataaattagctctcaaagctgaagagtcaattagacgatcagggggaatgcctcaaaaattcgggaccatcactgtaagtgatggcatttccatgggaacagaggggatgaaatattcattagtttcaagagaagtaatagctgactcgattgaaacagcatgtaatgctcaaagtatggatgcagtacttgctataggtggatgcgataaaaatatgcctggagcaatgatagcgattgcgaggatgaatattccctcaatatttatctatggaggaactataaaaccaggcaaattacatggggaagatcttacggttgttagtgcgttcgaagctgttggacagttaacatcaggcaaaattaatgagaaaaggttaatcgaagttgagaaaaattgtatccctggagctggaagctgtgggggaatgtttacggctaatacaatgtctgcagtaatagaagtgttaggtttaagccttccacacagttcaactatggctgctgaagatcttgaaaaagaactaagtgcagaaaaaagtgctgagatattagtatctgcgattaaaaaaaatataagaccattagacttaatgactaaaaaagcatttgaaaatgcaatatcagtaattatggccgtaggaggttcaacgaatgcagtattacatatattagcaatagcaaatactgcaggtattgatattaatattgatgactttgagaggataagacaaaaagttcctgtaatttgtgaccttaagccaagtggaaaatttgtaacagttgatcttcataatgcagggggaattccccaagttatgaaaatactcctaaatgcaggattaattcatggggaatgcaaaaacattgaaggcaaaactataactgaatacttacaaaacattccagataagcctcctagtaatcaaaatgtcatccgaggaatagattatcccctttataaaaaagggcatttagcaattttaaaagggaacctggcaaaggaaggttctgtagcaaaaattagtggagtaaaaaatccagttttaacaggtccagcaaagatattcgagagtgaagaagattgtcttaaagcaatcttaaataacgaaattatagctggtgatgttgttgttgtaagaaatgaaggtcctgtcggaggtccagggatgagagaaatgttatccccaacatcagcaattgttggacaaggacttggagaaaaagtggccttaattactgatggtaggtttagcggtggctcttatggtcttgttgtcgggcatatagcccctgaagcagctgtcggtggaaacattgctctaataaaagaaggtgatttgattacagttgatgctgtaaagcaactaattgaggttgatttatctgacgaagaattagaaaaaagaaaaaataattgggtaaaacctaaacctaaatataaaagaggaatactttcaaagtattcgaaaatagtaagtacatcaagtttaggggctgttactgatttatag

SEQ ID NO: 274 - protein, 557 aa, Prochlorococcus marinus
MNKLRSSAITQGVQRSPNRSMLRAVGFNDEDFNKPIIGVANGYSTITPCNIGLNKLALKAEESIRRSGGMPQKFGTITVSDGISMGTEGMKYSLVSREVIADSIETACNAQSMDAVLAIGGCDKNMPGAMIAIARMNIPSIFIYGGTIKPGKLHGEDLTVVSAFEAVGQLTSGKINEKRLIEVEKNCIPGAGSCGGMFTANTMSAVIEVLGLSLPHSSTMAAEDLEKELSAEKSAEILVSAIKKNIRPLDLMTKKAFENAISVIMAVGGSTNAVLHILAIANTAGIDINIDDFERIRQKVPVICDLKPSGKFVTVDLHNAGGIPQVMKILLNAGLIHGECKNIEGKTITEYLQNIPDKPPSNQNVIRGIDYPLYKKGHLAILKGNLAKEGSVAKISGVKNPVLTGPAKIFESEEDCLKAILNNEIIAGDVVVVRNEGPVGGPGMREMLSPTSAIVGQGLGEKVALITDGRFSGGSYGLVVGHIAPEAAVGGNIALIKEGDLITVDAVKQLIEVDLSDEELEKRKNNWVKPKPKYKRGILSKYSKIVSTSSLGAVTDL

SEQ ID NO: 275 - DNA, 1674 bp, Prochlorococcus marinus
atgaataaactcagatcatctgcaataacccaaggtgtgcaaagatcacctaacagatcgatgttaagagctgttggatttaatgatgaagattttaataaacctattattggagttgcaaatggatacagcaccataacaccatgcaatatgggtttaaataagttagctctaaaagctgaagagtctataaaaagatcaggtgggatgcctcagatgtttgggactataacagtaagtgatgggatttctatgggaacagagggcatgaaatattccctagtttcaagagaagttattgctgattcaattgaaacagcatgcaatgctcagagtatggatggagtacttgctataggtggatgtgataaaaatatgccgggtgccatgattgcgattgcaagaatgaatattccatcaattttcatttatggaggaacaataaagcctgggaaattgcatggagaagatcttactgttgttagtgcatttgaagctgttggacaattaacatcaggcaaaattaatgaagaaaggctaatccaagttgagaaaaattgtattcctggtgctggtagctgtggaggaatgtttacagctaatacaatgtctgcggttattgaagtattagggttaagtcttcctcacagttccactatggctgctgaagatcttgaaaaagaactaagtgcagacaaaagtgctgagatattagtctccgcaatagaaaaagatataagacctctagacctaatgactaagaaagcatttgaaaatgcaatatcagtaattatggcaattggcggatcaacaaatgcggtattgcacatcttagctatcgcgaatactgcaggaatagatatcaacattaatgattttgagagaatcagacaaaaagtacccgttatttgtgaccttaaaccgagtggtaaatatgtgacggtggatcttcataaggcaggtgggattccacaagtaatgaaaatacttttgaatgcaggattaattcatggcgattgcaaaaacattgaaggaaaaaccatctcagaatacttacaaaatattccagataagcctccaacaaatcaaaatgtcataagagacatagataaccctctttataaaaaaggacatctagcgatattaaaaggtaacttagcgagcgaaggttctgtagccaaaattagcggagtaaaaaaccctgtattaacaggtcccgcaaaaatttttgaaagtgaagaagattgtttaaaatcgatattaaataacgatatcaaagctggtgatgttgttgttattagaaacgaaggtcctgtaggaggaccaggtatgagagagatgttagctccaacatctgcaattgttggtcaagggctaggagagaaggtggctttaattaccgatggcagatttagcggcggtacctatggtcttgttgtgggtcacatagctccagaggctgctgtaggaggaaatattgctctaataaaacaaggtgatttaattacagtagatgctgtaaaacaactaattgaagttgatttatctgacgaagaattagaaaaaagaaaaaaagattgggtaaaacctattcaaaaatacaaaagaggaattctttcaaaatattcgagaatcgtaagcacatcaagtttaggggctgttactgatttataa

SEQ ID NO: 276 - protein, 557 aa, Prochlorococcus marinus
MNKLRSSAITQGVQRSPNRSMLRAVGFNDEDFNKPIIGVANGYSTITPCNMGLNKLALKAEESIKRSGGMPQMFGTITVSDGISMGTEGMKYSLVSREVIADSIETACNAQSMDGVLAIGGCDKNMPGAMIAIARMNIPSIFIYGGTIKPGKLHGEDLTVVSAFEAVGQLTSGKINEERLIQVEKNCIPGAGSCGGMFTANTMSAVIEVLGLSLPHSSTMAAEDLEKELSADKSAEILVSAIEKDIRPLDLMTKKAFENAISVIMAIGGSTNAVLHILAIANTAGIDININDFERIRQKVPVICDLKPSGKYVTVDLHKAGGIPQVMKILLNAGLIHGDCKNIEGKTISEYLQNIPDKPPTNQNVIRDIDNPLYKKGHLAILKGNLASEGSVAKISGVKNPVLTGPAKIFESEEDCLKSILNNDIKAGDVVVIRNEGPVGGPGMREMLAPTSAIVGQGLGEKVALITDGRFSGGTYGLVVGHIAPEAAVGGNIALIKQGDLITVDAVKQLIEVDLSDEELEKRKKDWVKPIQKYKRGILSKYSRIVSTSSLGAVTDL

SEQ ID NO: 277 - DNA, 1680 bp, Prochlorococcus marinus
atgaataaattaagatcttctgcaataactcaaggtgttcaaagatctcctaacagatcaatgttaagagcagttggatttagtgatgatgatttcactaaaccaatcattggagtcgctaatggatatagcaccattacaccctgcaatatgggccttaacaagttagctcttaaggcagaagattcaataaggaaatcaggaggaatgcctcaaatgttcggaactatcaccgtaagcgatgggatctccatgggaacagaaggaatgaaatattctttagtttcaagggaagtaatagccgattcaatagaaactgcctgtaatgcgcaaagtatggatggtgttttagctattggtggttgtgataaaaatatgccgggtgcaatgatagcaattgcaagaatgaatatcccttccatatttatttatggaggaacaataaaacctggaaagttaaacggtgaagacttaacggttgtcagtgcatttgaagctgttgggcaattaacctcgggtaaaataaatgagaagagattaaatgaagttgagaaaaattgtattccaggagcaggaagttgtggaggaatgttcacagctaatactatgtcagcagttatagaagtcttaggtttaagtcttcctcatagttcaacaatggcagccgaagattatgagaaggtggtaagtgctgaaaaaagcgctgaaatacttgtagatgcaataaaaaaagatataaggccactagatcttatgactaaagaatcttttgaaaatgcaatatctgtaattatggctattggaggttcgacaaatgcagtgcttcacatattagcgatagcgaatactgcaggtatagagatcaatattgatgattttgaaagaataagacaaaaagttcctgtgatttgtgatttgaaacctagcggcagatatgtcacagtagatcttcataatgcaggaggcattccacaagtaatgaaaatacttttaaatgcaggattaataaatggtgattgcaaaaatatcgaaggtaaaacaatatctgaatatttacttaatattccagataatcctcctgaaaatcaaaatgttattagaaacataaataatcctctttataaaaaaggtcatttagcaatattaaaaggtaatttagcttcggaaggttgtgtagcaaaaatcagcggagtaaagaatccagttttaaagggtcccgctcgaatttttgaaagtgaggaagattgtcttaaatcaattttgaataatgatattaaagctggtaatgttgtcgttataagaaatgaaggtcctgtgggaggaccgggaatgagagaaatgttagctccaacatctgcaattgttgggcaagggctgggagaaaaagtagctttaataactgatggtagatttagtggaggtacctatggccttgttgttggacatatcgcaccagaggcagcagtaggagggaatatagctttaataagagagggagatttaatcactgttgatgctgtaaaccaattaattgaagttgaactatctgatggggaattagaaaaaagacgaattaactggataaagcctattccgaaatataagaaaggtgtactttcaaaatattcaagaattgtaagtacttcaagcttaggtgcagttacagatctggaaaaataa

SEQ ID NO: 278 - protein, 559 aa, Prochlorococcus marinus
MNKLRSSAITQGVQRSPNRSMLRAVGFSDDDFTKPIIGVANGYSTITPCNMGLNKLALKAEDSIRKSGGMPQMFGTITVSDGISMGTEGMKYSLVSREVIADSIETACNAQSMDGVLAIGGCDKNMPGAMIAIARMNIPSIFIYGGTIKPGKLNGEDLTVVSAFEAVGQLTSGKINEKRLNEVEKNCIPGAGSCGGMFTANTMSAVIEVLGLSLPHSSTMAAEDYEKVVSAEKSAEILVDAIKKDIRPLDLMTKESFENAISVIMAIGGSTNAVLHILAIANTAGIEINIDDFERIRQKVPVICDLKPSGRYVTVDLHNAGGIPQVMKILLNAGLINGDCKNIEGKTISEYLLNIPDNPPENQNVIRNINNPLYKKGHLAILKGNLASEGCVAKISGVKNPVLKGPARIFESEEDCLKSILNNDIKAGNVVVIRNEGPVGGPGMREMLAPTSAIVGQGLGEKVALITDGRFSGGTYGLVVGHIAPEAAVGGNIALIREGDLITVDAVNQLIEVELSDGELEKRRINWIKPIPKYKKGVLSKYSRIVSTSSLGAVTDLEK

SEQ ID NO: 279 - DNA, 1680 bp, Prochlorococcus marinus
atgaataaattaagatcatctgcaataactcaaggtgtccaaagatctcctaacagatcaatgttaagagctgttggttttagtgatgaagattttactaaacctataattggagttgctaacggatttagtactatcacaccatgcaatatgggtctaaacaagttagctctaaaagctgaagaatcaataagagaagcaggaggtatgcctcagatgttcggaaccatcaccgtaagtgatggaatctctatgggaacagagggaatgaaatattccctagtttcaagagaggttatagctgattcaatcgaaacagcatgcaatgcgcaaagtatggatggggttttagctattggaggttgtgataaaaatatgccaggagcaatgattgcaattgcaagaatgaatatcccatccatatttatttatggaggaacaataaaacctggtaaattaaatggtgaagatcttacagttgtcagtgcatttgaagctgttgggcaattaacttctgggaaaataaatgagaagagattaattgaagttgaaaaaaattgtatcccaggagctggaagttgtggaggaatgtttacagctaacactatgtctgctgttatagaagtcttgggtttaagtcttccatatagttcaacaatggcagctgaagattacgaaaaggaagttagcgctgaaaaaagtgctgaaatattagttgatgcaattagaaaagatattagacctttaactctcatgactaaagaatcatttgagaatgcaataactgtcattatggctattggaggttcaactaatgccgttctccatatattagcaatagcaaatacagcaggtatagatatcaatattgatgatttcgaaagaataagacaaaaagtacctgtaatttgcgacttaaaacccagcggtaaatacgtaacagtcgatcttcataaagcaggtggaattccacaagttatgaaaatacttctaaacacaggtttgatacatggtaattgtagaaacatagagggtaaaacagtagttgaatccttaaaagatattccagttaaacctccagagaatcaggatgtcattcgagatattgataatccactttataaaaaaggtcacttagcgattctaaaagggaacttagcctcggaaggttgtgtagccaaaattagtggaataaagaatcctgtattaaaaggacctgctcgcatctttgagagtgaggaggattgtctcaaatcaattttgaataatgatattaaagctggtaatgttgttgttataagaaatgaaggtcctgtgggcggaccagggatgagagaaatgttggcaccaacatccgcaattgttgggcaaggacttggagaaaaagtagcgctaataactgatggtagatttagtggaggcacctatggcctagttgttggccacattgcaccagaggcagcagttggaggaaatatagcgttaataaaagaaggcgatttaataactgttgatgctacaaaccaattaatcgaagttgaactatctgatgaggaattagaaatgagaagaattaactgggaaaagcctagtaaaaaatataaaaaaggagttctttctaaatattcaagaattgttagcacctcaagcctaggagccgttacagatttggaagaataa

SEQ ID NO: 280 - protein, 559 aa, Prochlorococcus marinus
MNKLRSSAITQGVQRSPNRSMLRAVGFSDEDFTKPIIGVANGFSTITPCNMGLNKLALKAEESIREAGGMPQMFGTITVSDGISMGTEGMKYSLVSREVIADSIETACNAQSMDGVLAIGGCDKNMPGAMIAIARMNIPSIFIYGGTIKPGKLNGEDLTVVSAFEAVGQLTSGKINEKRLIEVEKNCIPGAGSCGGMFTANTMSAVIEVLGLSLPYSSTMAAEDYEKEVSAEKSAEILVDAIRKDIRPLTLMTKESFENAITVIMAIGGSTNAVLHILAIANTAGIDINIDDFERIRQKVPVICDLKPSGKYVTVDLHKAGGIPQVMKILLNTGLIHGNCRNIEGKTVVESLKDIPVKPPENQDVIRDIDNPLYKKGHLAILKGNLASEGCVAKISGIKNPVLKGPARIFESEEDCLKSILNNDIKAGNVVVIRNEGPVGGPGMREMLAPTSAIVGQGLGEKVALITDGRFSGGTYGLVVGHIAPEAAVGGNIALIKEGDLITVDATNQLIEVELSDEELEMRRINWEKPSKKYKKGVLSKYSRIVSTSSLGAVTDLEE

SEQ ID NO: 281 - DNA, 1671 bp, Prochlorococcus marinus
atgcttcgatccagtgcaatcacccaaggaattcagagatcaccaaatagggctatgctccgagcggttggatttaatgataatgattttaacaagccaataattggtattgctaatgggtacagcacaattacaccatgcaatgttggattaaataacctagccctacacgcagaagcctcaacaaaagtatcaggcgctatgccacaaatgtttggcacaataactgttagcgatggaatatctatggggaccgaagggatgaaatattcactagtttcaagagaggttatagccgattcaatagagacagcatgtaatgctcaaagcatggacggtgttcttgcaataggaggatgtgataaaaatatgcctggagccatgattgccatggcaagaatgaatatacccgcaattttcgtgtatggagggacaattaaaccagggaaattagacggttgtgatttaacagtagtaagtgcatttgaagccgttgggcaattaacaagtggaaagattactgaagataaacttattgctgtagaaaagaattgtattcctggagcaggaagttgtggaggaatgttcacagctaataccatgtccgcagcaatagaaacgctcggattaagcttgccttatagctcaacaatggctgctgaagataaggaaaaaatagagagtgctgagcgtagtgccaaagtcctggtagatgcaattgaaaaaaatatacgtcctttagacctcctaaccaagaaatcatttgaaaatgctattgccgtagtcatggctgttggcgggtcgacaaatgccgtattacatttattagctattgctaggtcatcaggagtggacttatgcatagatgattttgaaagaattcgacagaaggtacctgtgatttgtgatttaaagccaagtggcaaatatgtcactgtagatctacataaagctggtggaatacctcaggtaatgaagctgcttttagatgcgggcttattacatggtgattgtttaactattgaaggtataactatcgatgagtccttaaaaaatatcccttcagagccaccagcgaaccaaaatgtgatatctccaatcacaaagccaatatataaaaaaggacatctagcaatcttaaaaggaaatctcgcaaccgaaggatgcgtagccaaaataagtgggattaggaccccagtgttgaaaggtccagcaaaagtatttgaaagtgaagaagactgtctcgacgcaatcttaaaagaacagatacaagaaggagatgtaatagttattagaaacgaaggccctgtaggaggacccggaatgagagaaatgttagcaccaacctctgccatagttggacaaggcctaggggataaggttgctctaataacagatggacgttttagcggtggtacttatggtttggtagtgggacatatagcaccagaagcatcagtgggagggaatatagccctagtcaaagaaggtgacatgattactgttgacgcgcacaaaaagttgattcaattggaagtagatgaaaaggagctctcaaaaaggaggactttatgggaaaaaccagaagttaaatataagactggaatactaggtaaatatgcgcgtttagttagcagttcaagcaagggtgctgtaactgatcaaccatga

SEQ ID NO: 282 - protein, 556 aa, Prochlorococcus marinus
MLRSSAITQGIQRSPNRAMLRAVGFNDNDFNKPIIGIANGYSTITPCNVGLNNLALHAEASTKVSGAMPQMFGTITVSDGISMGTEGMKYSLVSREVIADSIETACNAQSMDGVLAIGGCDKNMPGAMIAMARMNIPAIFVYGGTIKPGKLDGCDLTVVSAFEAVGQLTSGKITEDKLIAVEKNCIPGAGSCGGMFTANTMSAAIETLGLSLPYSSTMAAEDKEKIESAERSAKVLVDAIEKNIRPLDLLTKKSFENAIAVVMAVGGSTNAVLHLLAIARSSGVDLCIDDFERIRQKVPVICDLKPSGKYVTVDLHKAGGIPQVMKLLLDAGLLHGDCLTIEGITIDESLKNIPSEPPANQNVISPITKPIYKKGHLAILKGNLATEGCVAKISGIRTPVLKGPAKVFESEEDCLDAILKEQIQEGDVIVIRNEGPVGGPGMREMLAPTSAIVGQGLGDKVALITDGRFSGGTYGLVVGHIAPEASVGGNIALVKEGDMITVDAHKKLIQLEVDEKELSKRRTLWEKPEVKYKTGILGKYARLVSSSSKGAVTDQP

SEQ ID NO: 283 - DNA, 1677 bp, Prochlorococcus marinus
atgaagcttagatcaagcgcaataactcaaggcgtacagagatcgccaaacagagcaatgcttcgtgctgttgggtttgaagacgatgatttcaacaaaccaataataggtattgcaaatgggtatagcactatcacgccttgtaatattgggctaaatgatttggcaaaacaagcagaaaaagcaataaaggattgggatggtatgcctcaaatgtttggaacaattactgttagtgatggaatatctatggggactgaagggatgaaatactccttggtctctagagaagtaatagccgattcaatagaaactgcatgcaatgctcaaagcatggatggagtgttagcaataggtggttgcgataaaaacatgcctggtgcaatgctagccatggcaagaatgaatattccagggatatttgtttatgggggaacgatcaaaccaggaaaattaaatggcgaggatttgacagttgtaagtgcatttgaagctgtggggcaattaactagtgggaaaataacaaaagaaaaattgattgaggttgaaaaacattgcattccaggggctggtagttgtggaggtatgtttacagcaaacacaatgtcagcagccattgaagctatgggactaagtcttcctcacagttcaaccatggctgctgaggatcaagaaaaaataaaaagtactcaaaaaagtgccgaggttcttattaaagctatcaaggaaaatattcgcccattagatttattaaccaagcaagcattcgagaatgcaataagtgtagtaatggcagttgggggctctacaaatgctgtgcttcatcttttagcaattgctcattcatcgggagttgaactttctcttgacgaatttgaaaagatacgtcaacgagttccggtactttgtgatttaaagcccagtggtaaatatgtgactgttgacctacacaaagcaggaggcattccacaagtcatgaaaatacttcttgaagcaggattgattaatgaaaattgtagaacaatagaaaacaaaacaatcaaggaaatgctgctcgatgttcccgcagagcccccatcagatcaggatgttattcggcctttcgattcgccggtctataaaaaaggtcatttagcaattctcaaaggaaatcttgcaactgagggaagcgttgcaaaaatcagtggtataaaagaaccaatccttacaggtccagcaaaagtatttgaaagtgaagaagattgcttaaaagcaatacttactgaacaaattcactcaggtgatgtagtagtcataagaaatgaaggcccagttggtgggccagggatgagagaaatgctcgctccaacatctgcaattgttggtcaaggtcttggtgaaaaagttgctttaattactgacggacgttttagtggcggaacatatggactagtagttggtcatgtcgcaccagaagcagccgttggagggaatattgctctaattcaagatggtgacagcataactgttgatgctattcaaaaactcattcaagtaaatatcgaagaagcagaattaaaaagacgacgttcactttgggttaagccaaagcccaaatacaattcaggagttcttgggaaatatgcaactttggttagtagttcaagcaaaggtgctgtaactgatcagaactgttaa

SEQ ID NO: 284 - protein, 558 aa, Prochlorococcus marinus
MKLRSSAITQGVQRSPNRAMLRAVGFEDDDFNKPIIGIANGYSTITPCNIGLNDLAKQAEKAIKDWDGMPQMFGTITVSDGISMGTEGMKYSLVSREVIADSIETACNAQSMDGVLAIGGCDKNMPGAMLAMARMNIPGIFVYGGTIKPGKLNGEDLTVVSAFEAVGQLTSGKITKEKLIEVEKHCIPGAGSCGGMFTANTMSAAIEAMGLSLPHSSTMAAEDQEKIKSTQKSAEVLIKAIKENIRPLDLLTKQAFENAISVVMAVGGSTNAVLHLLAIAHSSGVELSLDEFEKIRQRVPVLCDLKPSGKYVTVDLHKAGGIPQVMKILLEAGLINENCRTIENKTIKEMLLDVPAEPPSDQDVIRPFDSPVYKKGHLAILKGNLATEGSVAKISGIKEPILTGPAKVFESEEDCLKAILTEQIHSGDVVVIRNEGPVGGPGMREMLAPTSAIVGQGLGEKVALITDGRFSGGTYGLVVGHVAPEAAVGGNIALIQDGDSITVDAIQKLIQVNIEEAELKRRRSLWVKPKPKYNSGVLGKYATLVSSSSKGAVTDQNC

SEQ ID NO: 285 - DNA, 1707 bp, Nodularia spumigena
atggaaggaaaaaaaatgtcggagaatttaagaagccaagttgttacccaaggagtgcagcgatcgcctaatcgagctatgctgcgtgcagtgggttttaaggacgaagattttaataaagccattgtcggcattgctaatggctacagtacaatcactccctgcaatatgggaattaataaactagcactaagagccgaaattggcgtaagagaagctggggcaatgccgcaaatgttcggtactatcaccattagtgatgggatttctatgggaaccgaggggatgaaatattccctagtgtcacgagaagttattgctgattccattgaaaccgcctgtactggacaaagtatggatggcgttttggctattggtggctgtgataaaaatatgccaggggcaatgctagcgatggcgcgcatgaatattcctgctatttttgtttatggtggcacaattaaacccggtcactacgatggtaaagatttaaccgtcgtgagttcctttgaagcagttggtcaatacagcgccggtaaaattgatggtgatgaactcttagcagtggaacgtgaagcttgtcctggtgctggttcctgcggtgggatgtttacagcaaataccatgtcttccgcttttgaagcaatgggcatgagcttaccttattcttccacaatggcagccgaagatgctgaaaaagccgacagtacgcaaaaatcagcagttgctttagtagaagccatacgtaagcaaatcttacctcggcagattatcacccgtaaatctatagaaaatgccatttcagtaattatggcagtgggtggttccacaaatgcagtattgcactttttagcgatcgctcgtgcagctggagtagaactcacactagatgattttgaaaccatccgtggacgtgtcccagttatctgtgatttaaaacccagtggtaaatatgtcgccacagacctgcacaaagctggcggaatacctcaagtcatgaaaatgttacttgtgcatgatttactccacggcgactgcttaactatcacaggtaaaacagtagcagaagtcttagcagatatctccgcagaaccacgtaccgaccaagatgtgattcgtccttggaataaccccatgtatgctcaaggacacttagccatcctcaaaggcaacctagccacagaaggggctgtagccaaaatcaccggagttaaaaagccgattattactggccctgcacgggtatttgagtctgaggaatcctgtttagatgccatcctcgcaaataaaattaatgccggggatgttctcataattcgttacgaaggtcccaagggtggccctggtatgagagaaatgcttgctcccacctcagcaattattggggctgggttaggcgatgcagtaggtttaattactgatgggcgcttttccggcggtacttacggcatggtagttggtcacgtagccccagaagcagccgttggtggtgcgatcgctcttgtagaagaaggtgatagcattaccattgatgcctctaatcgcctcttgcaattgaacgtctcagatgaagaattagcccgtagacgtgccaattggcaaccccttccaccccgttacaccaaaggcgtacttgctaaatatgccaaattagtatcttctagcagtgttggagcagtcacagatttagacttatttaatggttag

SEQ ID NO: 286 - protein, 568 aa, Nodularia spumigena
MEGKKMSENLRSQVVTQGVQRSPNRAMLRAVGFKDEDFNKAIVGIANGYSTITPCNMGINKLALRAEIGVREAGAMPQMFGTITISDGISMGTEGMKYSLVSREVIADSIETACTGQSMDGVLAIGGCDKNMPGAMLAMARMNIPAIFVYGGTIKPGHYDGKDLTVVSSFEAVGQYSAGKIDGDELLAVEREACPGAGSCGGMFTANTMSSAFEAMGMSLPYSSTMAAEDAEKADSTQKSAVALVEAIRKQILPRQIITRKSIENAISVIMAVGGSTNAVLHFLAIARAAGVELTLDDFETIRGRVPVICDLKPSGKYVATDLHKAGGIPQVMKMLLVHDLLHGDCLTITGKTVAEVLADISAEPRTDQDVIRPWNNPMYAQGHLAILKGNLATEGAVAKITGVKKPIITGPARVFESEESCLDAILANKINAGDVLIIRYEGPKGGPGMREMLAPTSAIIGAGLGDAVGLITDGRFSGGTYGMVVGHVAPEAAVGGAIALVEEGDSITIDASNRLLQLNVSDEELARRRANWQPLPPRYTKGVLAKYAKLVSSSSVGAVTDLDLFNG

SEQ ID NO: 287 - DNA, 1701 bp, Nostoc punctiforme
atgtcggagaatttgagaagccaagtagtgacgcaaggagtgcagcgatcgccaaatcgagctatgctgcgggcagttggttttaaagatgaagatttcaataaagccattgtcggtatagccaacggttacagcacgatcaccccctgcaatatggggataaatcaactggcacagagggcagaagctgggattaaaaccgccggagcaatgccgcaaatatttggcacaattaccatcagcgacgggatttcaatgggaaccgaagggatgaaatattccctagtatcgcgggaagttatcgccgattccatcgaaaccgcctgtaccggacaaagtatggatggtgtactagccattggtggctgtgataagaatatgccaggcgcaatgctagcgatcgcgcggatgaatatcccggcaatattcgtttacggtggcacaattaaacccggtcactacaacggacgcgatttaaccgttgtcagttcttttgaagctgttggtcaatacagtgcgggaaaaattgacgacaaggaattattagaagtcgaaagtcgcgcttgtcctggcgctggttcctgcgggggaatgttcacagctaacaccatgtcttcagcatttgaagcgatgggaatgagtttaccctattcttccacaatggcagccgaagatgccgaaaaagccgacagcacggaaaaatcagcctttgtgctagtcgaagccatcaagaagcaaatcttaccccggcaaattatcacccgtaaatctatagagaatgccatctctgtgattatggcggtgggtggttcgaccaatgcagtattgcatttcttagcgatcgcccgcgctgcgaatgtagagttaaccctagatgactttgaaacaatccgcgcccgtgttcccgttttgtgcgatctaaaaccaagcggtaaatatgtcgctacagatttgcacaaagctggtggcattccgcaagtcatgaagatgctactcgcacatggcttattgcatggtgatagtctcaccattagcggtcaaaccattgcagagatattagcagacatacccgaagagccatctgccaatcaagatgtgattcgggcttggaataacccgatgtatgctcaaggacatttagccatcctcagaggtaatctggcaacggaaggggctgtcgctaaaattaccggcgtgaaaaaaccagtcattaccgggcctgcacgggtgtttgagtcggaagaagcctctttagatgcaattttggcgggtaaaattcaagctggtgatattttggttattcgctacgaagggcccaaaggcggccctggaatgcgagaaatgttggctcccacttcggcaattatcggggctggcttgggtgatgcggtgggattaattaccgatgggcgcttttctggcggtacttatggcatggtggttggtcatgttgctccagaagcagcagtgggtggtgcgatcgcgcttgttgaagaaggcgatagtattaccattgatgcacccgcacgccttttgcagttgaatatatctgaagaagaattagctcgtcgtcgtgctaattggcaacctcccgctccacgttacaccaaaggcgtgttggcgaaatatgccaaactggtatcttctagcagcatcggtgctgtgacagatttggatttgttcaaaccacaacagaactaa

SEQ ID NO: 288 - protein, 566 aa, Nostoc punctiforme
MSENLRSQVVTQGVQRSPNRAMLRAVGFKDEDFNKAIVGIANGYSTITPCNMGINQLAQRAEAGIKTAGAMPQIFGTITISDGISMGTEGMKYSLVSREVIADSIETACTGQSMDGVLAIGGCDKNMPGAMLAIARMNIPAIFVYGGTIKPGHYNGRDLTVVSSFEAVGQYSAGKIDDKELLEVESRACPGAGSCGGMFTANTMSSAFEAMGMSLPYSSTMAAEDAEKADSTEKSAFVLVEAIKKQILPRQIITRKSIENAISVIMAVGGSTNAVLHFLAIARAANVELTLDDFETIRARVPVLCDLKPSGKYVATDLHKAGGIPQVMKMLLAHGLLHGDSLTISGQTIAEILADIPEEPSANQDVIRAWNNPMYAQGHLAILRGNLATEGAVAKITGVKKPVITGPARVFESEEASLDAILAGKIQAGDILVIRYEGPKGGPGMREMLAPTSAIIGAGLGDAVGLITDGRFSGGTYGMVVGHVAPEAAVGGAIALVEEGDSITIDAPARLLQLNISEEELARRRANWQPPAPRYTKGVLAKYAKLVSSSSIGAVTDLDLFKPQQN

SEQ ID NO: 289 - DNA, 1692 bp, Nostoc sp.
atgtcggagaattttagaagcaaggctatcacacaaggggtacagcgatcgcctaacagagcaatgctgcgggctgttggttttcaggatgcagattttaccaaagccattgtaggtgttgccaatggttacagcacgattaccccgtgtaatatggggataaatcaactagcacaaagggcagaagctggtataaatactgctggagcaaagccgcaaatattcggtacaattacgattagtgatgggatttcgatgggaaccgaagggatgaaatattccctggtatcacgagaagtaatcgctgactccattgaaaccgtttgtaatgggcaaagtttagacggggtaattgccattggtggctgtgataagaatatgccaggggcaatgattgcgatcgcccggataaatatccctgctatctttgtttacggtggcacaattaaacccggacattacaacggtaaagatttaactgttgtcagttcttttgaggctgttggtgagtacagcgccggtaaaattgacgaaaatgaactgttagcagtagaacgcaatgcttgtcctggtgcaggttcctgcggtgggatgtacacagcaaataccatgtcctctgcttttgaagcactggggatgagtttgccctattcgtctacaatggcggcagaagatgacgaaaaagctgatagtacggaagaatcagccaaggtattggtagaggcgattcgtcatcaattattacccagacagattatcactcgtaagtccatagaaaacgccatatctgtaattatggctgtgggtggttctactaatgcggtgttacattttctagcgatcgcccgtgcggctggtgtagaactaaatctggacgactttgaaactattcgtggtcgtgtccccgttttgtgcgacttgaaaccaagcggtagatatgtggctacagacctgcacaaagctggtggtataccccaagtcatgaaaatgttactcgtgcatggtttactccacggcgactgtatgaccatcacaggtaaaaccattgccgaagttttagcagatatcccagaagaaccatcgcctaatcaagatgtaattcgtccttggaataaccccatgtatgcccaaggccacttggctatactcaaaggtaatttggcaacagaaggcgcagttgccaaaattactggtgtgaaaaatcctgtgattacagggccagccaaagtatttgaatcagaagaggattgtttagatgcaattttggcaggtaaaattaaagccggtgacgtgattgtcatccgctacgaaggccccaaaggcggccctgggatgcgagaaatgttagcccccacctcagctattatcggtgcaggtttaggcgactcagtgggactaattaccgatggacgcttctccggtggtacttacggtatggttgtgggacacgttgcaccagaagcagccgttggtggggcgatcgctctggtacaagaaggtgatagcatcacaattgatgcccacgcccgttctttgcagttgaacatatcagacgaagaattaacccgtcgtcgtgccaattggcaaccccgtcccccacgttacactacaggcatactggcaaaatacgccaagttggtagcttctagtagtgtgggtgctgtcaccgatttagacttattcaataaatag

SEQ ID NO: 290 - protein, 563 aa, Nostoc sp.
MSENFRSKAITQGVQRSPNRAMLRAVGFQDADFTKAIVGVANGYSTITPCNMGINQLAQRAEAGINTAGAKPQIFGTITISDGISMGTEGMKYSLVSREVIADSIETVCNGQSLDGVIAIGGCDKNMPGAMIAIARINIPAIFVYGGTIKPGHYNGKDLTVVSSFEAVGEYSAGKIDENELLAVERNACPGAGSCGGMYTANTMSSAFEALGMSLPYSSTMAAEDDEKADSTEESAKVLVEAIRHQLLPRQIITRKSIENAISVIMAVGGSTNAVLHFLAIARAAGVELNLDDFETIRGRVPVLCDLKPSGRYVATDLHKAGGIPQVMKMLLVHGLLHGDCMTITGKTIAEVLADIPEEPSPNQDVIRPWNNPMYAQGHLAILKGNLATEGAVAKITGVKNPVITGPAKVFESEEDCLDAILAGKIKAGDVIVIRYEGPKGGPGMREMLAPTSAIIGAGLGDSVGLITDGRFSGGTYGMVVGHVAPEAAVGGAIALVQEGDSITIDAHARSLQLNISDEELTRRRANWQPRPPRYTTGILAKYAKLVASSSVGAVTDLDLFNK

SEQ ID NO: 291 - DNA, 1686 bp, Trichodesmium erythraeum
atgccagagaatttgagaagtcaattagtcaccaaaggagtacaacgcgctcccaaccgagctatgctgagagctgtgggttttgaagattcagactttaccaaaccaattattggggttgccaatgcccatagcactattactccctgcaacatgggtattaatgatttggccatgagagctgtaagtggagtgaaagaagctggaggaatgccgcagatatttggaactattactattagcgatggaatttctatgggtactgaggggatgaaatattctctggtttctagagacgttattgctgattccatcgaaacagtttgtaatggccaaacaatggatggagttctagctattggtggatgcgataaaaatatgccaggagcaatgatagcgatcgctaggatgaatattcctgctatcttcgtatacggtggtactattaaaccaggcaactacaacggtaaagacctaacagttgtaagtgcttttgaagcagtgggagaatatagtgctggaaaaattgacgaaacagaattaacagaagttgaacgtagagcttgccctggtgctggttcctgtggaggaatgtttactgccaatactatgtcttcagcttttgaagcaatgggtatgagtctcatgtattcatcaacaatggctgcagaagatgcagaaaaagcagatagcacagaaaaatcagctcatgttttagtagaagctattcgcaaacaaattttacctagtcaaattattacccgtaaagctatcgaaaatgcaatttcagtaattatggctgtagggggttccactaatgcagtactacacctattagcaattgcttatgctgcaaatgtgaagttatctttagatgattttgaaataattagggccagagtacctgtattatgtgatttgaaacctagtggtaaatacgttacaacaaatttgcatcaagcgggtggaattcctttagtaatgaaaatgcttttagaacatgatttactccacccagatgctttaaccataacaggtaagactattggagagcaattaacaaatataccttctgaaccaccttctaatcaagacgtgattcgcccttggaataatcctatgtatgctcaaggacacttggctattttaaaaggaaatttggcgacagagggagcagttgctaaaattacaggagtgaagaacccagaaataacaggactagcaagagtatttgattcggaagaagcttgtttagaagcaatattagcagggaaaattcaagcagggaatattattgtagttcgctatgaaggtccaaaaggtggaccaggtatgcgagaaatgttagcaccaacttcggctattattggtgctggtttgggggataaagtgggattaattactgatggtaggttttctggtggtacttatggtatggtggttggtcatgtagctccagaagctgcagtaggtggcacgatcgctctagttaaggaaggagatatgattactattgatgctcataagcgtttactacagttaaatatttctgatgaggaattagaaaagcgtcgtcaagtatggaaaccacgaaaaccccaatatactagaggtgtattagctaaatatgctaagttagtttcttctagcagtgttggagcagtaactgacgctggattaggttga

SEQ ID NO: 292 - protein, 561 aa, Trichodesmium erythraeum
MPENLRSQLVTKGVQRAPNRAMLRAVGFEDSDFTKPIIGVANAHSTITPCNMGINDLAMRAVSGVKEAGGMPQIFGTITISDGISMGTEGMKYSLVSRDVIADSIETVCNGQTMDGVLAIGGCDKNMPGAMIAIARMNIPAIFVYGGTIKPGNYNGKDLTVVSAFEAVGEYSAGKIDETELTEVERRACPGAGSCGGMFTANTMSSAFEAMGMSLMYSSTMAAEDAEKADSTEKSAHVLVEAIRKQILPSQIITRKAIENAISVIMAVGGSTNAVLHLLAIAYAANVKLSLDDFEIIRARVPVLCDLKPSGKYVTTNLHQAGGIPLVMKMLLEHDLLHPDALTITGKTIGEQLTNIPSEPPSNQDVIRPWNNPMYAQGHLAILKGNLATEGAVAKITGVKNPEITGLARVFDSEEACLEAILAGKIQAGNIIVVRYEGPKGGPGMREMLAPTSAIIGAGLGDKVGLITDGRFSGGTYGMVVGHVAPEAAVGGTIALVKEGDMITIDAHKRLLQLNISDEELEKRRQVWKPRKPQYTRGVLAKYAKLVSSSSVGAVTDAGLG

SEQ ID NO: 293 - DNA, 1686 bp, Acaryochloris marin
atgtctgacaatcgaaatagccaagtcgtcactcaaggagttcaacgagcccccaaccgggccatgctaagggctgtgggctttggagatgatgattttaccaagccgattgttgggttagcgaatggttttagtacgattaccccttgtaatatgggcatagactctctggctacacgggcagaggccagtatcagaacggctggagccatgccgcaaaagtttggcaccatcactatcagtgacggcatttccatgggcacggaagggatgaaatattccttggtgtcccgggaagtgattgcagactccatcgagacggcctgtatgggccaaagtatggatggagtactcgccattggcggctgtgataaaaatatgccgggggctatgctcgccatggctcggatgaatattccggccatctttgtttacggcggcacgatcaaacccggacatctaaatggtgaagacttaaccgtggttagtgcctttgaagctgtgggtcagcatagtgctggacggattagtgaagccgagttaacggcagtggagaaacatgcttgtccgggtgctggatcctgtggcggtatgtatacggccaacaccatgtcttctgcgtttgaggcaatgggcatgagcctgatgtattcttccaccatggcagcggaagatgaagaaaaagccgtcagtgcagaacagtctgccgctgttttagtggaagcgatccacaagcaaattctgccccgcgatatcttgacccgcaaagcctttgaaaatgccattgctgtgattatggctgtaggcggatccaccaatgccgttctccacctgttggccatttcccgcgcggctggagactccctgaccctagatgacttcgaaaccatccgggctcaagttccagtgatctgcgatctcaaaccatcaggtcgctatgtagccacagatctccataaagcaggtggaatcccattggtgatgaaaatgctattggaacatggtcttctccatggtgatgctctgaccattacgggtaaaaccattgctgagcagttggctgatgtcccatcagagccttcccccgatcaggatgtaattcggccttgggacaatcccatgtataaacaaggccacctcgccatcctccggggtaacttggccacggaaggagcggttgccaaaatcacaggcattaaaaatccccaaattacgggtccagctcgggtatttgaatcggaagaggcttgcttggaggcgattttggcaggcaagattcagcctaatgatgtgattgtggtgcggtatgaaggcccgaagggtgggccgggaatgcgagagatgttagctcccacgtccgcgattattggggcaggtttgggtgattcagttggattgattacggatggtcgcttttctggtggaacttacggcatggtggttgggcatgtggccccagaagctgcggtgggtggtacgattgcccttgtgcaggaaggcgatcagattacaattgatgcccatgctcgaaagttggagctgcatgtgtctgatcaggagttaaaagagcggaaggagaagtgggagcaaccaaaacctctctataacaaaggggttttggcaaagtatgccaagttagtttcttctagtagtgttggagctgttactgatttagatctattttga

SEQ ID NO: 294 - protein, 561 aa, Acaryochloris marin
MSDNRNSQVVTQGVQRAPNRAMLRAVGFGDDDFTKPIVGLANGFSTITPCNMGIDSLATRAEASIRTAGAMPQKFGTITISDGISMGTEGMKYSLVSREVIADSIETACMGQSMDGVLAIGGCDKNMPGAMLAMARMNIPAIFVYGGTIKPGHLNGEDLTVVSAFEAVGQHSAGRISEAELTAVEKHACPGAGSCGGMYTANTMSSAFEAMGMSLMYSSTMAAEDEEKAVSAEQSAAVLVEAIHKQILPRDILTRKAFENAIAVIMAVGGSTNAVLHLLAISRAAGDSLTLDDFETIRAQVPVICDLKPSGRYVATDLHKAGGIPLVMKMLLEHGLLHGDALTITGKTIAEQLADVPSEPSPDQDVIRPWDNPMYKQGHLAILRGNLATEGAVAKITGIKNPQITGPARVFESEEACLEAILAGKIQPNDVIVVRYEGPKGGPGMREMLAPTSAIIGAGLGDSVGLITDGRFSGGTYGMVVGHVAPEAAVGGTIALVQEGDQITIDAHARKLELHVSDQELKERKEKWEQPKPLYNKGVLAKYAKLVSSSSVGAVTDLDLF

SEQ ID NO: 295 - DNA, 1683 bp, Lyngbya sp.
atgtcagataactttagaagtcaagccatcacccaaggaaagaaacgcacaccgaaccgggcgatgctccgagcggtagggtttggggatgaggactttaataagcctattgtcggcattgctaatggttacagtaccattactccctgcaacattggattgaacgatttggcgcatcgtgctgaaacggcattaaaacaagccgacgctatgcctcaaatgtttgggacgattactgttagtgatggcattgccatgggaaccgaggggatgaaatattctctggtttcccgagaggtgatcgccgatgcgattgaaactgcttgtaatgggcagagtatggatggcgttttggcgattggcggttgtgataaaaatatgcctggggcgatgattgcgatcgcgaggatgaatattccggcaatttttgtgtatggcggtacgattaaaccggggaatttaaacggttgtgatttaacggttgtcagtgcgtttgaggctgtcggcgaatacagcgccgggaaacttgatgatgatcgcttactcgatattgaacgccttgcttgtccgggttcggggtcttgtgggggaatgtttacggcaaatactatgtcttcggcgtttgaagcgatggggatgagtttaatgtattcttccacaatggcttctgaagatgcggaaaaggctgatagtaccgaaaagtctgcgtttgtgttgcgtgaggcgattagtcaacggattttaccgaagcaaattctcacccgcaaggcgtttgaaaatgcgatcgctgtgattatggcggtgggcggttcgacaaactcggtattacacttgttggcgattgcttatgcagcagatgtggaactgacgattgatgattttgaaacaattcggggacgggttccggttttatgtgatcttaaacccagtgggcgatttgtcacgacggattttcacaaagcgggtggcgttccgctgattatgaaaatgcttctcgaacagggtttaattcatggtgatgctttaacgattaccgggaaaacggttgccgaacagttggctgatattccctctcaaccgtctgcggatcaagaggtgattcgcccctggaataatccgatgtacaagcaagggcatttagcgattttgaagggaaatctcgccacagaaggcagtgttgctaaaattacaggcgtgaaaaaaccgcaaatgactggccccgcacgggtatttgagtcggaagaacagtgtttagaggcgattttagcgggtaaaattcaagctggagatgttttggtggttcgctatgaaggccccaaaggtggccccggaatgcgagaaatgttggcgccgacttccgcaattattggggcaggcttaggggattctgtgggcttgattaccgatggacggttttcggggggaacttatggcttggttgtcggtcatgttgccccagaagctgccgttggtggtaatattgcgttggttcaagagggcgatagtattacgattgatgcttcacaacggttattgcaggtgaatatttctgatcaggtattggaacaacgccgtcaaaattggcaaccgcctcaacctcgttacacaaaaggtgttttagctaaatatgcgaagttagtgtcttcgagtagtgtgggggcggtgacggatttagactgttaa

SEQ ID NO: 296 - protein, 560 aa, Lyngbya sp.
MSDNFRSQAITQGKKRTPNRAMLRAVGFGDEDFNKPIVGIANGYSTITPCNIGLNDLAHRAETALKQADAMPQMFGTITVSDGIAMGTEGMKYSLVSREVIADAIETACNGQSMDGVLAIGGCDKNMPGAMIAIARMNIPAIFVYGGTIKPGNLNGCDLTVVSAFEAVGEYSAGKLDDDRLLDIERLACPGSGSCGGMFTANTMSSAFEAMGMSLMYSSTMASEDAEKADSTEKSAFVLREAISQRILPKQILTRKAFENAIAVIMAVGGSTNSVLHLLAIAYAADVELTIDDFETIRGRVPVLCDLKPSGRFVTTDFHKAGGVPLIMKMLLEQGLIHGDALTITGKTVAEQLADIPSQPSADQEVIRPWNNPMYKQGHLAILKGNLATEGSVAKITGVKKPQMTGPARVFESEEQCLEAILAGKIQAGDVLVVRYEGPKGGPGMREMLAPTSAIIGAGLGDSVGLITDGRFSGGTYGLVVGHVAPEAAVGGNIALVQEGDSITIDASQRLLQVNISDQVLEQRRQNWQPPQPRYTKGVLAKYAKLVSSSSVGAVTDLDC

SEQ ID NO: 297 - DNA, 1686 bp, Synechocystis sp.
atgtccaacaatcccagaagccaggtaattacccagggcacccaacggagtcccaaccgggccatgctccgggccgttggttttggcgatgatgactttacgaaacccattgtgggtattgccaacgggtacagcaccattaccccctgcaacatgggcattaatgatctggctctacgggccgaggccggcttacggacagcgggggccatgccccaattgtttggcactatcaccatcagtgacggtatttccatgggtacggaagggatgaaatattccctagtttcccgggaagtgattgctgattccatcgaaacagtatgcaatggccaacgcatggacggagttttggcgatcgggggctgtgataagaatatgccgggggcaatgattgccatggctcgcctcaatattccctctatctttgtttacggtggcactattaaacccggacattatgccggggaagatttaacagtggtcagtgcctttgaagcggtgggccagtacagcgctggcaaaattgatgaggaaaccctctacggcattgaacggaatgcctgtcctggggctggttcctgtggggggatgttcaccgccaacaccatgtcctccgcctttgaagctatggggatgagcttgccctattcttctaccatggccgcagtggatggggaaaaagccgacagcaccgaggagtccgccaaggttttggtggaagccatcaaaaaacagattttgcccagtcaaattctgacccggaaagcttttgaaaatgccattgccgtgattatggccgtggggggctccactaatgcagtgctccatctgctggcgatcgccaacaccattggggtgcccctaagcttggacgattttgaaaccattcgccacaaagtacctgtactgtgcgacctcaaaccttccggcaaatacgtcaccactaatctccacgccgccggtggcattccccaggtgatgaaaatattgctggtcaatggcattctccacggtgacgctttaacgattacaggacagaccattgctgaagttttagccgatattcctgaccaaccccctgccggccaggacgtaatccattcctgggatgaccctgtttatcaagaaggtcacctggcagtgctcaaaggtaacctggccaccgaaggcagtgtggctaaaatcagcggtgttaaaaagccggtgatcactggtcccgccaaagtatttgaatctgaagaagattgcctagaagcgattctagccggcaaaattcaagcaggagatgtggtggtcgtgcgctatgaagggcccaaaggtggccccggtatgcgggaaatgctagcccccacttctgccatcattggggcagggttgggagactccgttggcctaatcaccgatggccgcttttctggtggtacctatggcttagtggtgggtcacgttgcccccgaagcttatgtgggaggggcgatcgccttggtgcaagagggggatcaaatcaccatcgatgctggcaagcggttactgcaactcaacatcagtgaagaggaattggcccaacggcgggcccaatggactcctcctcagccccgctatccccgggggattttagccaagtatgccaagttagtttcctccagcagccttggtgcagtgactgatatagacttgttctaa

SEQ ID NO: 298 - protein, 561 aa, Synechocystis sp.
MSNNPRSQVITQGTQRSPNRAMLRAVGFGDDDFTKPIVGIANGYSTITPCNMGINDLALRAEAGLRTAGAMPQLFGTITISDGISMGTEGMKYSLVSREVIADSIETVCNGQRMDGVLAIGGCDKNMPGAMIAMARLNIPSIFVYGGTIKPGHYAGEDLTVVSAFEAVGQYSAGKIDEETLYGIERNACPGAGSCGGMFTANTMSSAFEAMGMSLPYSSTMAAVDGEKADSTEESAKVLVEAIKKQILPSQILTRKAFENAIAVIMAVGGSTNAVLHLLAIANTIGVPLSLDDFETIRHKVPVLCDLKPSGKYVTTNLHAAGGIPQVMKILLVNGILHGDALTITGQTIAEVLADIPDQPPAGQDVIHSWDDPVYQEGHLAVLKGNLATEGSVAKISGVKKPVITGPAKVFESEEDCLEAILAGKIQAGDVVVVRYEGPKGGPGMREMLAPTSAIIGAGLGDSVGLITDGRFSGGTYGLVVGHVAPEAYVGGAIALVQEGDQITIDAGKRLLQLNISEEELAQRRAQWTPPQPRYPRGILAKYAKLVSSSSLGAVTDIDLF

SEQ ID NO: 299 - DNA, 1686 bp, Cyanothece sp.
atgtctgagaatgcaagaagtcgcctcattaccgagggaagtcaacgaacccctaaccgtgccatgttgcgtgctgtgggcttcggagatgatgattttaataagcctattgttggggtagctaatggcttcagtaccataaccccttgtaacatggggattaatgacctagctaaacgtgctgaagcaggaattaaaaccgctggtgggatgcctcagatattcggtaccattaccatcagtgatggcatttctatgggaaccgaaggcatgaaatattccctcgtctcacgggatgttattgccgactctatcgaaaccgtttgtaatggtcaaagcatggatggagtgatcgctattggtggatgcgacaagaatatgccaggggcaatgatagccatggcaagaatgaatatacctgcaatctttgtctatggaggaaccattaaacccggccattacaacggggaagatttaacagtagtcagtgcctttgaagcggtcggccaacatagtgcaggtaagatagatgatagcacattattggctattgaacgtaatgcttgccccggtgccggttcctgtgggggaatgttcaccgcaaataccatgtcttcagcgtttgaagtgatgggaatgagtttaccttattcttctacgatggcagcagaagatgcagaaaaagcagacagtacagaaaagtcagcttttgctttagttaatgccattcgtaaccagattttacccagtcacattttaacccgaaaagcctttgaaaatgccatttctgtaatcatggcggtgggaggttctacgaatgctgtattacaccttttagcgatcgctaataccatcggtgttgacctaactttagacgattttgaaaccattcgtcaacgggttcctgtactctgtgatttaaaaccatcgggacgctatgtaacggttaatttgcatgaagcgggtggcattcctcaagtgatgaaactattattaaatcatggattattacatggggatgcgttaacgatttccggtcaaactatagcagaaattttagccgatgtaccggatgaacctccagcgaatcaagatgttattcggacttgggataaccctgtttataaagagggacatttagccattttaaaaggtaatttagcctctgagggtgcagttgccaaaattagtggggtaaagaatcccaaaataacaggtccggcgcgagtttttgagtcggaagaggaatgtttagaggcaattttagcaggaaaaattaacgctggtgatgtcattattgtccgttatgaaggtcctagaggaggcccaggaatgcgagaaatgttagcaccaacttctgcaattattggggctggtttaggtgattccgtgggcttaattaccgatggccggttttctgggggaacctatggtttagtggtgggtcatgttgccccagaagcttacgtagggggtactattggcttagtaaaagaaggggatagtattaccattgatgctaaagaaaaactccttcaagtcaatgtttctgaagaagaattaaaccaacgtcgggctaattggaaagctcccgaacctcgttataaaagaggggtattaggtaagtatgccaagttagtttcttctagtagtttaggggcagttactgacgtgaatttgttttaa

SEQ ID NO: 300 - protein, 561 aa, Cyanothece sp.
MSENARSRLITEGSQRTPNRAMLRAVGFGDDDFNKPIVGVANGFSTITPCNMGINDLAKRAEAGIKTAGGMPQIFGTITISDGISMGTEGMKYSLVSRDVIADSIETVCNGQSMDGVIAIGGCDKNMPGAMIAMARMNIPAIFVYGGTIKPGHYNGEDLTVVSAFEAVGQHSAGKIDDSTLLAIERNACPGAGSCGGMFTANTMSSAFEVMGMSLPYSSTMAAEDAEKADSTEKSAFALVNAIRNQILPSHILTRKAFENAISVIMAVGGSTNAVLHLLAIANTIGVDLTLDDFETIRQRVPVLCDLKPSGRYVTVNLHEAGGIPQVMKLLLNHGLLHGDALTISGQTIAEILADVPDEPPANQDVIRTWDNPVYKEGHLAILKGNLASEGAVAKISGVKNPKITGPARVFESEEECLEAILAGKINAGDVIIVRYEGPRGGPGMREMLAPTSAIIGAGLGDSVGLITDGRFSGGTYGLVVGHVAPEAYVGGTIGLVKEGDSITIDAKEKLLQVNVSEEELNQRRANWKAPEPRYKRGVLGKYAKLVSSSSLGAVTDVNLF

SEQ ID NO: 301 - DNA, 1683 bp, Thermosynechococcus elongatus
atggcagaaaattggcgcagtcgcatcatcacagaaggcattcaacgcacccccaaccgagccatgctgcgagccgtgggttttggtgacgaggattttaacaagcccattgtgggggtggccagtgcccacagcacaattacgccctgcaacatggggattgctgcccttgccagtcgcgccgaagcaggaattcgggccgcgggagggatgccgcaattgtttggcaccattacggtcagcgatggtatttccatgggcactgaagggatgaaatactctttggtctcgcgggatgtgattgctgattcgattgagactgtctgtaatgcccagagtatggatggggtgctggcgatcggtggctgtgacaagaatatgcctggcgccatgattgccatggcacggatgaacattccagccatttttgtctatgggggtacgattaagcccggtcattggcaggggcaagaccttacggttgtcagcgcctttgaggccgtaggtcagtttagtgccggcaaaatggatgaggcaacgctccatgccattgaacaccatgcctgtccgggggcgggctcctgtggcgggatgttcacagccaatacgatgtcctcggcctttgaggccatgggcatgagtttaatgtattcctcaacgatgacggcggaagatgccgaaaaagctgacagcactgagttggcgggcaaggtgctggtggaggcaatccgcaaaaatattcgcccccgtgacattattacccgcaaatccattgaaaatgccatcagtgtgattatggctgtggggggatccacaaatgccgtgctgcattttctggcgatcgcccacagtgccgaggttcccttgaccattgatgattttgaaacgattcgccagcgggtgcccgttctctgcgacctcaagccctcgggtaaatacgtcactgcggatctacatcgggcagggggcattccccaagtcatgaaaatgctcctcaatgccggattgctccacggggattgcctaacgattactggagaaaccattgccgagcggctgcggcatgtgcccgatacccccgaccccaaccaagatgtgattcgtccttttgatcaacccttgtatgccacgggtcacctggctattctcaagggcaatctagccagcgaaggtgctgtagccaaaatctccggggtgaaaaatccccaaattaccgggcctgcccgcgtctttgactccgaggaagactgccttgacgccattctggcgggcaagatcaaccccggcgatgtcattgtcattcgctatgaaggccccgtcggcggtccggggatgcgggaaatgctggctcccacctctgccattattggtgcgggtttaggggatagtgttggcctcattaccgatggtcgcttttccggaggcacctatggcatggtcgtcggtcatgtggcgccggaagcggcagttggtgggacgatcgcccttgtgcaggagggagattcgattaccattgacgcccatcggcggctcctacaactgaatgtcagtgaggaagaactggcggcgcggcgggctaaatggcagccccctgcccctcgctacacccgtggtgtcttggctaaatatgccaaactagtgtcctctagtagtctgggagcggtgacggatcgctttgtctag

SEQ ID NO: 302 - protein, 560 aa, Thermosynechococcus elongatus
MAENWRSRIITEGIQRTPNRAMLRAVGFGDEDFNKPIVGVASAHSTITPCNMGIAALASRAEAGIRAAGGMPQLFGTITVSDGISMGTEGMKYSLVSRDVIADSIETVCNAQSMDGVLAIGGCDKNMPGAMIAMARMNIPAIFVYGGTIKPGHWQGQDLTVVSAFEAVGQFSAGKMDEATLHAIEHHACPGAGSCGGMFTANTMSSAFEAMGMSLMYSSTMTAEDAEKADSTELAGKVLVEAIRKNIRPRDIITRKSIENAISVIMAVGGSTNAVLHFLAIAHSAEVPLTIDDFETIRQRVPVLCDLKPSGKYVTADLHRAGGIPQVMKMLLNAGLLHGDCLTITGETIAERLRHVPDTPDPNQDVIRPFDQPLYATGHLAILKGNLASEGAVAKISGVKNPQITGPARVFDSEEDCLDAILAGKINPGDVIVIRYEGPVGGPGMREMLAPTSAIIGAGLGDSVGLITDGRFSGGTYGMVVGHVAPEAAVGGTIALVQEGDSITIDAHRRLLQLNVSEEELAARRAKWQPPAPRYTRGVLAKYAKLVSSSSLGAVTDRFV

SEQ ID NO: 303 - DNA, 1698 bp, Synechococcus sp.
atggccaattcccctttcccgctgcgcagccaagtggttacccagggagtacagcgctcccccaaccgcgccatgctcagggccgtaggctttcgcgacgaagacttcggcaagcccattgtcggcattgccaacgcccacagcaccctcaccccctgcaacatggggatccaaactctggcggagcgggcggaggcggctttgagaacggcgggctgtatgccccaggtgttcggcaccatcaccattagcgacggcatctcgatgggcacggaggggatgaaatactccctggtgtcgcgggaagtgattgccgattccatcgagacggtggtcaacggccagagcatggatggcctcttggccattggcggctgcgacaagaacatgccgggggcgatgatcgccatggcccgcctcaatgtgccctccatcttcgtctacggcggcaccatcaagccgggtcactacaatggccgcgacctcaccatcgtcagcgcctttgaagcggtgggggagttcagtgccgggcgcatctccgaggaagagctgctggcggtggagcgccatgcctgtcccggtgccggatcctgcggcggcatgtacacggccaacaccatgtccagcgcgtttgaggctatggggatgagtctgccctactcctccaccatggctgcagaagacgaagagaaagccgaaagtgccgcccaatcggccaaggtcttggcagaggccatcaaagccaacatccgcccccgcgacatcatcacccgtaaaagcattgaaaatgccatctcggtgatcatggccgtagggggatccaccaacgccgtgctccactttctggccattgcccatgcggcagaagtgcccctgacgctagatgatttcgagaccattcgtgctcgcgtgcctgtcctctgcgatctcaagccttcagggcggtttgtggccaccgacctgcaccgggccggtgggatcccccaggtgatgaaaatgctgctcaaccacggcctgctgcacggggactgcctcaccatctccggccagaccatcgtcgaagtcctgcgggatgtgccggacgagcctagcccggatcaggaggtgatccgcccttggcacagccccctgtatccccaagggcatctggccatcctcaaggggaatctggctcccgaaggagcagtagccaagattaccggcgtcaagaacccgcaaattaccgggccggcgcgggtcttcgattcagaggagtcctgcctgcaggccatcctctccggccagatccgagcaggggatgtggtggtgatccgctacgaaggccccaaaggtggccccggcatgcgggagatgctctcgcccacttcggccatcatcggcgccggcttgggggatagcgttggcctgatcaccgatggccgcttctccggcggcacctacggcatggtagtgggccatgtggctcccgaagcctatgtggggggcacgattgccctggtggaggaaggggatctcatcaccattgatgccccggctcgccagttgcacttgcatgtgagcgaagaagagctggcccgccgccgcgcccgctggtctcctcctgagcctcgctacaaacggggcaccctagccaagtacgccaagctggtctccagcagcagcctgggggcagtgacggatttaaacctgtgggattaa

SEQ ID NO: 304 - protein, 565 aa, Synechococcus sp.
MANSPFPLRSQVVTQGVQRSPNRAMLRAVGFRDEDFGKPIVGIANAHSTLTPCNMGIQTLAERAEAALRTAGCMPQVFGTITISDGISMGTEGMKYSLVSREVIADSIETVVNGQSMDGLLAIGGCDKNMPGAMIAMARLNVPSIFVYGGTIKPGHYNGRDLTIVSAFEAVGEFSAGRISEEELLAVERHACPGAGSCGGMYTANTMSSAFEAMGMSLPYSSTMAAEDEEKAESAAQSAKVLAEAIKANIRPRDIITRKSIENAISVIMAVGGSTNAVLHFLAIAHAAEVPLTLDDFETIRARVPVLCDLKPSGRFVATDLHRAGGIPQVMKMLLNHGLLHGDCLTISGQTIVEVLRDVPDEPSPDQEVIRPWHSPLYPQGHLAILKGNLAPEGAVAKITGVKNPQITGPARVFDSEESCLQAILSGQIRAGDVVVIRYEGPKGGPGMREMLSPTSAIIGAGLGDSVGLITDGRFSGGTYGMVVGHVAPEAYVGGTIALVEEGDLITIDAPARQLHLHVSEEELARRRARWSPPEPRYKRGTLAKYAKLVSSSSLGAVTDLNLWD

SEQ ID NO: 305 - DNA, 1683 bp, Gloeobacter violaceus
atgtccggcaatctgcgcagccgcatcgtcacccagggggtgcagcgctcccccaaccgcgccatgctgcgggcggtgggttttggcgacggtgatttcgagcggcccatcgtgggggtggccaacggcttcagcacgattaccccctgcaatctgggcctgggagctttggcggagcgggcggaggcggcgttgcgcgccggcggggcgatgccccaactattcggaacgatcacgatcagcgacggcatctcgatgggtaccgaggggatgaagtactcgctggtgtcccgcgaggtgatcgccgacagcatcgagacggtctgcaacggtcagagcctggacggggtgctcgctatcggcggctgcgacaagaacatgccgggtgcgatgatcgccattgccagactcaatatcccggcggtcttcgtctacggcggcacgatcaaacccggccgctaccaggatcaggacctcacggtcgtgagcgccttcgaagcggtgggccagtacagcgccggcaaaattgaccagacgaccctcgtcgaaatcgagcggcgcgcctgcccgggggcgggctcctgcggcggcatgtacaccgccaatacgatgagttcggccttcgaggcgatgggcatgagcttggtgtactcctcgacgatggccgccgaggatcccgaaaaagcggacagcaccgccctgtcggccaaggtgctggttgaagcgatccaagcgcaaatcctgccgagcgccatcctgacgcgaaaagctttcgagaacgccatcgctgtgatcatggccatcggcggctcgaccaacgccgtgctgcacctgcttgccatcgcccacagcgcccgggtgccactcgcactggatgacttcgagtgcatccgcgcgcgggtgccggtgctgtgcgatctcaagcccagcggtcgctttgtcgccaccgatctgcacagagccgggggtattccccaggtgatgaaaatgttgctcgtgcgcgggctcctccacggcgacgccctcacggtaaccggccagacggtcgccgaggtgctgcgcgacgtacccacagaaccgcgcaccgaccaggaggtgatccgtccctgggaccggcctctctacagttcggggcacctggccattttgcgcggcaacctggcgagcgaaggggcggtcgccaagattaccggcgtcaaaaagccccagatcactggtcctgcccgcgtcttcgactccgaagaaagctgcatggaagcaattctggcgggcgccatccagccgggcgatgtgatcgtcattcgctacgaaggccccaagggcggtcccggcatgcgggagatgctctcgcccacttcggccatcatcggcgcgggtctgggcgatgcggtgggactgatcaccgacggccgcttctcggggggcacctacggcatggtcgtgggccacgtcgccccggaagccttcgtgggcggcaccatcgccctggtcgaagcaggagatctgatcaccatcgacgccccggcgcgcaagatcgagctattggtgaccacagacgaactggagcgccgacgcgccgcctggcggccgcctgccccccgttacatccgcggggtgctcgccaagtacgcccgtcaggtgaacagcagcagcctcggggcggtcaccgacgcctttatttga

SEQ ID NO: 306 - protein, 560 aa, Gloeobacter violaceus
MSGNLRSRIVTQGVQRSPNRAMLRAVGFGDGDFERPIVGVANGFSTITPCNLGLGALAERAEAALRAGGAMPQLFGTITISDGISMGTEGMKYSLVSREVIADSIETVCNGQSLDGVLAIGGCDKNMPGAMIAIARLNIPAVFVYGGTIKPGRYQDQDLTVVSAFEAVGQYSAGKIDQTTLVEIERRACPGAGSCGGMYTANTMSSAFEAMGMSLVYSSTMAAEDPEKADSTALSAKVLVEAIQAQILPSAILTRKAFENAIAVIMAIGGSTNAVLHLLAIAHSARVPLALDDFECIRARVPVLCDLKPSGRFVATDLHRAGGIPQVMKMLLVRGLLHGDALTVTGQTVAEVLRDVPTEPRTDQEVIRPWDRPLYSSGHLAILRGNLASEGAVAKITGVKKPQITGPARVFDSEESCMEAILAGAIQPGDVIVIRYEGPKGGPGMREMLSPTSAIIGAGLGDAVGLITDGRFSGGTYGMVVGHVAPEAFVGGTIALVEAGDLITIDAPARKIELLVTTDELERRRAAWRPPAPRYIRGVLAKYARQVNSSSLGAVTDAFI

SEQ ID NO: 307 - DNA, 1674 bp, Nitrosomonas eutropha
atgccagacaatcgacgcagccaggccatcactaaaggtgcgaaacgtgctcccaatcgcgccatgttacgtgcagttggattcggtgacggagatttcgataagcccattgtcggcattgccaacggcttttccaccatcacgccttgcaacatggggctggatacgcttgccaaatgtgcggaacatgcattgaaaaatgccggtgccatgccgcaaatgttcggcacgattacggtatcggatggtatctccatgggcaccgaaggcatgaaatactcactggtatcacgcgaggtaatcgctgattccattgaaacctgcgtgcaggcggaaagcatggatggcgtcattgccattggcgggtgtgacaaaaacatgcctggtgccctaatcgcgctggctagactgaacgtgccatccatttttgtctatggcggcaccatcaagcccggtcactaccagggtcgcgatctgacaatcgtcagtgcgtttgaagcggttgggcaacatagcgcacacaagattgatgatcaggaactgctggaagttgaacgccatgcctgtcccggcgcaggttcgtgcggcggcatgtacaccgccaacaccatgtcctctgcgattgaggcgatgggcatgagtctgccccattcctccactatggctgcggaagatgaggaaaagcggatcagcgccacccgctctgccgaggtgctggtggaagcaatcaaaaaacagattctgccgcgcagcctgattacccgcaagtcactcgaaaatgcagtaacggtagtcatggccgtaggcggctcgaccaatgctgtgctgcatctgctggccatcgcccacgcagcagaagtagattttcatattgacgatttcgaagcgattcgtgcccgtgtgccggtgttgtgtgacctgaaaccttccgggcgctacgtcgccactgatctgcacagagcaggcggcattccacaagtgatgaaaatgctgctcgtgcacggtctgctgcatggtgactgtctgaccatcagcggacaaactatcgctgaagtactgaaagatattcctgaacaaccgcgcgcggatcaaaacgtcatccgcacctgggacaacccggtgtatgaacaaggtcatctggcgatcctgaagggtaatctttcgccggaaggtgcggtggccaagatttccggtgtaaaaaaccccaatattaccgggcccgccagagtgtttgaatccgaagaaacctgtatgactgccattctcgatcgcaaaatcaagccgggtgatgttgtcgttattcgctacgaggggccacgcggcggtcccggcatgcgtgaaatgctctcccctacttcggcgctaatcggtgaaggattgggtgattcggtcggattgattaccgatggccgtttttccggcggcacctacggcatggtcgtaggccatgtagcaccggaagcatacgccgggggagtgatcgctctggtggaagaaggagattcaatcacaatcgatgcgcatcgccgcctgttacaactgaatgtttcagaaacagaattggaacgccgccgggctgcctggcagccgcctgcgccgcgctacacacgcggtgtactggcaaaatatgccaaactggtatcaaccgccagtcgtggtgcggttactgattaa

SEQ ID NO: 308 - protein, 557 aa, Nitrosomonas eutropha
MPDNRRSQAITKGAKRAPNRAMLRAVGFGDGDFDKPIVGIANGFSTITPCNMGLDTLAKCAEHALKNAGAMPQMFGTITVSDGISMGTEGMKYSLVSREVIADSIETCVQAESMDGVIAIGGCDKNMPGALIALARLNVPSIFVYGGTIKPGHYQGRDLTIVSAFEAVGQHSAHKIDDQELLEVERHACPGAGSCGGMYTANTMSSAIEAMGMSLPHSSTMAAEDEEKRISATRSAEVLVEAIKKQILPRSLITRKSLENAVTVVMAVGGSTNAVLHLLAIAHAAEVDFHIDDFEAIRARVPVLCDLKPSGRYVATDLHRAGGIPQVMKMLLVHGLLHGDCLTISGQTIAEVLKDIPEQPRADQNVIRTWDNPVYEQGHLAILKGNLSPEGAVAKISGVKNPNITGPARVFESEETCMTAILDRKIKPGDVVVIRYEGPRGGPGMREMLSPTSALIGEGLGDSVGLITDGRFSGGTYGMVVGHVAPEAYAGGVIALVEEGDSITIDAHRRLLQLNVSETELERRRAAWQPPAPRYTRGVLAKYAKLVSTASRGAVTD

SEQ ID NO: 309 - DNA, 1674 bp, Nitrosomonas europaea
atgccagataatcgacgcagccaaaccattacccaaggtgcacaacgcacccccaaccgcgccatgttacgcgcagtcggtttcggtgacggagacttcgataaacctatcgtcggggttgccaacggtttttccaccatcacaccctgcaacatggggctggatacccttgccaaatgcgccgaacatgcgctgaaaaccgccggtgccatgccgcagatgtttggcaccatcaccgtatccgacgggatctccatgggtaccgaaggcatgaagtattctctggtttcgcgcgaagtgatcgccgattcgatcgaaacctgcgtacaggcggaaagtatggatggcgtcatcgccatcggtggttgcgataaaaacatgcctggcgccatgatcgcgctggccagactgaacgtaccgtccatcttcgtctatggcggtaccatcaaacctggccattaccagggccgtgatctgaccatcgtaagcgctttcgaagctgtcggacagcataccgcgcacaagatagacgatcatgaactgctggaagtcgaacgccatgcctgtcccggcgccggttcgtgcggtggtatgtacacagccaacaccatgtcatctgccatcgaggcaatgggaatgagcctgccttactcttccaccatggcagcagaagatgaggaaaaacggatcagcgccatacgctccgccgaagtactggtggacgcggtcaaaaagcagattctgccgcgcagcctgatcacccgcaaatccatcgaaaatgcggtatctgtcgtcatggcggtgggaggttcgaccaatgccgtgctgcacctgctggccatcgcccatgcagccgaagtggaattcagcatcgatgatttcgaagccattcgtgcacgcgtaccggtattgtgcgatctgaaaccttccggacgctatgtagccacggatctgcacaaagcgggcggtattccgcaagtgatgaaaatgttgctggtacacgacctgctgcacggcgactgtctgaccatcagcggacaaaccatcgcggaagtgctgaaagacattcccgaacagccgcgtgccgatcaggatgtgattcaaccctgggacaatccggtatatgaacaggggcacctggcgatcctgaaaggtaatctttcatcagaaggtgcggttgccaagatttccggcatcaaaaatcccagtattaccggtcccgccagagtgttcgattctgaagaaacctgcatggctgccattcttgaacgcaaaatccagccaggtgatgtggtggtcatccgctacgaaggcccacagggcggacccggcatgcgcgaaatgctttctcccacttcagcactgatcggtgaagggctgggtgattcggtcgggttgattaccgatgggcgtttctccggtggtacctacggaatggtggtgggccatgtggcaccggaagcattcgccggcggaacgatcgccctggtacaagagggagattcgattacgatcgatgcacaccgtcgcctgctgcaactgaatgttcctgaagccgagctggaacgccgccgggcagcctggcatccacctgcaccacgctacacacgcggcgtactggcgaaatacgccaagctggtatccactgccagccgtggtgcagtcaccgattaa

SEQ ID NO: 310 - protein, 557 aa, Nitrosomonas europaea
MPDNRRSQTITQGAQRTPNRAMLRAVGFGDGDFDKPIVGVANGFSTITPCNMGLDTLAKCAEHALKTAGAMPQMFGTITVSDGISMGTEGMKYSLVSREVIADSIETCVQAESMDGVIAIGGCDKNMPGAMIALARLNVPSIFVYGGTIKPGHYQGRDLTIVSAFEAVGQHTAHKIDDHELLEVERHACPGAGSCGGMYTANTMSSAIEAMGMSLPYSSTMAAEDEEKRISAIRSAEVLVDAVKKQILPRSLITRKSIENAVSVVMAVGGSTNAVLHLLAIAHAAEVEFSIDDFEAIRARVPVLCDLKPSGRYVATDLHKAGGIPQVMKMLLVHDLLHGDCLTISGQTIAEVLKDIPEQPRADQDVIQPWDNPVYEQGHLAILKGNLSSEGAVAKISGIKNPSITGPARVFDSEETCMAAILERKIQPGDVVVIRYEGPQGGPGMREMLSPTSALIGEGLGDSVGLITDGRFSGGTYGMVVGHVAPEAFAGGTIALVQEGDSITIDAHRRLLQLNVPEAELERRRAAWHPPAPRYTRGVLAKYAKLVSTASRGAVTD

SEQ ID NO: 311 - DNA, 1674 bp, Nitrosospira multiformis
atgtcagataaccagcgcagccgggcaatcacccagggggcggaacgtacccccaaccgcgcgatgctgcgggccgtaggtttcagcgacaacgatttcgacaaaccaatcgtcggcgtggccaatggcttttccaccatcacaccctgcaacaagggattgaacgaactggcgctggctgccgagcaggcattgaaacaggcggctgcgatgccccagatgttcggtaccatcaccgtttccgatggcatctccatgggaacggagggcatgaagtattcactggtatcccgcgaagtcattgccgactcgatcgaaacggcggtgcaggccgaaagcatggatggcgtgatcgccatcgggggctgtgacaagaacatgccaggagcaatgatcgccattgcgcgcatgaatgttcccgcaatttttgtttatggcggaacgattaaaccgggccactataaaggaaaggatctcactattgtcagcgcattcgaagccgtcggacaatatacctcccacaagatagacgcgaaagaactgctcgaagtggagcgccacgcctgtccgggagccggctcctgcggaggcatgttcactgccaatacgatgtcgtccgctttcgaagcgatgggcatgagtctcccctattcttccacgatggccgcggaggatggcgagaagctaaccagcgcggcgcgctccgcggaagtgctcgtggatgccatcaggaaacagattcgcccgcgcgacatcattacccgcaagtccattgaaaacgcgatcgcggtgatcatggccgtgggtggttccaccaatgctgttttgcacttcctcgccattgcccatgcggccgaagtgacactcaccatcgatgattttgaacgcatgcgcggcaaagtgccggtactgtgcgatctcaaaccttcgggacggtacgttgccaccgacctgcacaaggcagggggcattccccaggtcatgaaaatgctgctcgaccacggcctgttgcatggcgactgcatcaccatcagcggacagaccattgccgagatattgaaggatgtgccgtcagagcctcgcgaagatcaggatgtcattcgccagtgggacaacccgttgtacgtccagggccacctcgccatactcaagggcaatctcgccccagaagggtgcgtggcgaaaatcaccggggtgaaatccccaaaaattaccggaccggcacgcgtattcgattcggaagaagcctgcatggcagctatccttgcgcgggagatccagcccggcgacgtggtggtgatacgctatgagggacccaagggcggccccggcatgcgggaaatgctgtctcccacttccgcgcttattggcgagggactcggagattcggtgggcctgatcaccgatggacgattctccgggggcacctatggaatggtggttggacacgtggcgccggaggcgttcgtaggcgggaccattgcgctggtgcgagaaggcgattcgattaccatagacgccgagcaacggctgctgcagctcaacattcccggagatgagctggctcggcgccgggctgaatggcaaccgccccatccgcgctacacccggggagtgctcgctaaatattcgaagctcgtctcgagtgccagccgcggcgcaatcaccgactag

SEQ ID NO: 312 - protein, 557 aa, Nitrosospira multiformis
MSDNQRSRAITQGAERTPNRAMLRAVGFSDNDFDKPIVGVANGFSTITPCNKGLNELALAAEQALKQAAAMPQMFGTITVSDGISMGTEGMKYSLVSREVIADSIETAVQAESMDGVIAIGGCDKNMPGAMIAIARMNVPAIFVYGGTIKPGHYKGKDLTIVSAFEAVGQYTSHKIDAKELLEVERHACPGAGSCGGMFTANTMSSAFEAMGMSLPYSSTMAAEDGEKLTSAARSAEVLVDAIRKQIRPRDIITRKSIENAIAVIMAVGGSTNAVLHFLAIAHAAEVTLTIDDFERMRGKVPVLCDLKPSGRYVATDLHKAGGIPQVMKMLLDHGLLHGDCITISGQTIAEILKDVPSEPREDQDVIRQWDNPLYVQGHLAILKGNLAPEGCVAKITGVKSPKITGPARVFDSEEACMAAILAREIQPGDVVVIRYEGPKGGPGMREMLSPTSALIGEGLGDSVGLITDGRFSGGTYGMVVGHVAPEAFVGGTIALVREGDSITIDAEQRLLQLNIPGDELARRRAEWQPPHPRYTRGVLAKYSKLVSSASRGAITD

SEQ ID NO: 313 - DNA, 1695 bp, Chloroflexus aggregans
atgagcgataatcgccgtagtcgtatgattaccgaaggcccacagcgttcacccaatcgggcaatgctgcgcgcggtcgggtttggcgacaacgattttacgaagccgatcgtgggagtggctaacggtcacagtacgctgacaccgtgcaacgccggcttaggggcgttggcagcgcgggcggaagccgctattcgtgccgcaggaggtatgccgcagatcttcggcacgatcacggtcagcgatggtatctcgatggggactgaagggatgaagtattctttggtcagccgcgaggtgattgccgattcgattgagacggtcgtcaacgcacagcggatggacggaatccttgcggtgggtggctgcgataagaacatgcccggcgccttaattgccatggcccggctcgacattccggccatctttgtctatggtggtactatcaaacccggtcattacaaaggccgtgacttgaccatcgtcagcgtgtttgaggcagttggcgaatacagtgccggtcggatcgacgaacacgagttgctcgaaatcgagcgtcacgcatgccccggcgtcggttcgtgtggtggtatgtacactgccaatacgatgtcgtcggcaattgaagcgctgggcttgagtttacccggctcttcaaccatggctgccgaagacgaggaaaaggcgatcagcgcagctcgttccggcgaggtgttagttgaggccatccgcgccaatcgcacagcgcgccagatgttgacccgcaagtcgtttgagaatgcgattgcagtagtgatggcgttaggtggctcgaccaacgccgttttgcatctgctggcgattgcctatgctgccaacgtaccgttgaccatcgatgattttgagacgatccgccagcgggtaccggtgctctgcgatctcaagccatcgggccgctatgtggcgaccgatctccaccgtgtcggtggtgtaccgcaggtgatgaagatgttgttgaatgccggcttactccacggtgattgtatgacgattaccggacagacaatcgctgaggtgctggccgatgtacccgacgagccgccggccgatcaagatgtcatccgcccctttcataaacccctctatccgcaaggacatttggccatcctccgtggtaatctggccgaagaaggctgcgttgcgaagattaccggtattaagcagcgctcgattaccggaccggcccgtgttttcgatgccgaagaggaatgtctcgaagcgattttgagtggcaagattaagccgggcgatgtcgtggtgatccggtacgaagggccgaagggtggtcccggtatgcgtgaaatgctcgctccgacatcggcgattatcggtgccggtttgggcgatagcgttggcctgattaccgacggacgcttctctggtggtacgtatggcttggtggtcggtcatgttgcccctgaagcggcggttggtggcaccattgccctggtcgaagagggtgatagtatcacgattgacgccgatgcccgtctcttgcagctcaatgtctcggacgaagagttggcacgacgccgtgctgcgtggcaaccccgtccgccacgctatacccgtggtgtattggcgaagtatgccaggctggtgtcgtcggctagccttggtgcagtgaccgaccgcttcgatggcgagtcggcgtaa

SEQ ID NO: 314 - protein, 564 aa, Chloroflexus aggregans
MSDNRRSRMITEGPQRSPNRAMLRAVGFGDNDFTKPIVGVANGHSTLTPCNAGLGALAARAEAAIRAAGGMPQIFGTITVSDGISMGTEGMKYSLVSREVIADSIETVVNAQRMDGILAVGGCDKNMPGALIAMARLDIPAIFVYGGTIKPGHYKGRDLTIVSVFEAVGEYSAGRIDEHELLEIERHACPGVGSCGGMYTANTMSSAIEALGLSLPGSSTMAAEDEEKAISAARSGEVLVEAIRANRTARQMLTRKSFENAIAVVMALGGSTNAVLHLLAIAYAANVPLTIDDFETIRQRVPVLCDLKPSGRYVATDLHRVGGVPQVMKMLLNAGLLHGDCMTITGQTIAEVLADVPDEPPADQDVIRPFHKPLYPQGHLAILRGNLAEEGCVAKITGIKQRSITGPARVFDAEEECLEAILSGKIKPGDVVVIRYEGPKGGPGMREMLAPTSAIIGAGLGDSVGLITDGRFSGGTYGLVVGHVAPEAAVGGTIALVEEGDSITIDADARLLQLNVSDEELARRRAAWQPRPPRYTRGVLAKYARLVSSASLGAVTDRFDGESA

SEQ ID NO: 315 - DNA, 1674 bp, Leptospirillum sp.
atgaaaaagccatttcgaagccggaccatcacccagggagtggaaagatctcccaacagggccatgctccgggccgtcgggttccaggatggggattttgaaaaaccgattatcggagtggcgaatggctacagcaccattacaccctgcaacatgggcctgaacagtctggctcttcgtgccgaggacgccattcgccagagaggagccatgccccagatgttcggaaccatcacggtttcggacggaatatcgatgggaacggaaggaatgaagttttccctggtgtcccgggaagtcatcgccgactccatcgaaacggcggtcagcgcccaaagcatggacggcgtgatcgccatcggggggtgcgacaagaacatgccgggagccctgatcgccatggggcgcatgaacatcccctccatttttgtttatggaggaaccatcaagcccggccactgggaaggtcaggacctgacggtcgtgagctcgttcgaagcggtcggggcctactcggcaggcaagatggacgaggcaaccctgaccgaaatcgagcgtcatgcctgtccgggagccggatcctgtggcggcatgttcactgccaataccatgtcgtcggcgatcgaagccatggggatgagtttgccctattcctccaccatggcagcggaagaccttgaaaaagccgaaagcgcagccgaatccgcaagagttcttgtccaggcggttctgaacgacctgcgtcctcgacagatcctgaccagaaaggcctttgaaaacgccattgcagtcctgatggccgttggaggctcgacgaacgcggttcttcacctcctcgcgatcgcccgctccgtcgacgtccccctttccatagacgactttgaacacattcgacgaaaggtccctgtcctttgcaacctcaagccctccggggcctatgtcgccacacagcttcacgctgtcgggggcattcccctcgtcatgcgcatgctgctggacaacggactccttcatggcgacgcgctgaccattacagggaagacgatttccgagacgctccgggacgttccttcccgtcccccggccggacaggatgtcgtgctcccctttgacaaacccgtttaccgggagggccaccttgcgatcctgaagggaaatctcgccccggaaggatcggtcgcaaagatctcgggcatcaaacaccgttccattaccggcccggcccgggtcttcgactccgaagaacgctgcatggcagccatcctggcccgggaaattcgtcccggagacatcgtcgtgatccggtacgaaggccccaaaggcggtcccggaatgcgggaaatgctggccccgacctccgccctgatcggagaaggtctcggggactcggtcggcctgattacagatggacgtttttccgggggcacatacggcatggtggtgggtcacgtctcgccggaagcggctgtgggcgggccgatcggactggtgcaggaaggagacctcattacgatcgacgccgaccggaatctgatcgaggtcaaggtttcaccggacgaaatgacaagaagaaaatctctgtggaaggaaccccctctccgatacacaaaaggaatcatggccaaataccgtcttctcgtcaaaagtgccagcgaaggcgccgtgacagactga

SEQ ID NO: 316 - protein, 557 aa, Leptospirillum sp.
MKKPFRSRTITQGVERSPNRAMLRAVGFQDGDFEKPIIGVANGYSTITPCNMGLNSLALRAEDAIRQRGAMPQMFGTITVSDGISMGTEGMKFSLVSREVIADSIETAVSAQSMDGVIAIGGCDKNMPGALIAMGRMNIPSIFVYGGTIKPGHWEGQDLTVVSSFEAVGAYSAGKMDEATLTEIERHACPGAGSCGGMFTANTMSSAIEAMGMSLPYSSTMAAEDLEKAESAAESARVLVQAVLNDLRPRQILTRKAFENAIAVLMAVGGSTNAVLHLLAIARSVDVPLSIDDFEHIRRKVPVLCNLKPSGAYVATQLHAVGGIPLVMRMLLDNGLLHGDALTITGKTISETLRDVPSRPPAGQDVVLPFDKPVYREGHLAILKGNLAPEGSVAKISGIKHRSITGPARVFDSEERCMAAILAREIRPGDIVVIRYEGPKGGPGMREMLAPTSALIGEGLGDSVGLITDGRFSGGTYGMVVGHVSPEAAVGGPIGLVQEGDLITIDADRNLIEVKVSPDEMTRRKSLWKEPPLRYTKGIMAKYRLLVKSASEGAVTD

SEQ ID NO: 317 - DNA, 1677 bp, Leptospirillum sp.
atgaaagacaaccggagaagtcgtgtcacgaccgaaggcgtggagcgctctcccaaccgggccctgcttcgggccacggggttccgggacgacgattttggcaagccgattgtcggggtggcgaacgcccacagttccatcaccccctgcaatatggggatcgggaaactcgcttcgcgggcggaagaagctctccgcaaggccggctccatgccccagaccttcgggaccatcacggtgtcggacggaatctcgatgggcaccgaaggcatgaaatattccctcgtctcgagggaagtgattgccgattcgatcgaaacggtcgtgaacgcgcagagcatggacggccttctggcgttcgggggatgcgacaaaaacatgccgggggcactgatcgcgatgggccgtctcgacattccctccgtcttcgtctacggagggacgattcgtccgggacaccacaacggacaggacctgaccgtcgtcagcgccttcgaggccgtcggggaatatctcgcgaaccggatcgaccgggaagaacttctggcaatcgaacgccacgcctgtcccggagccggatcctgcggcgggatgtttaccgccaacaccatggcagccctgatcgaaaccatgggcatgagcctcccctattcctccacgatggccgccgaagacgcggaaaaatcggaaaacgcggaagagtccgcgaagatcctggtcaacgccatccggaaccagatccgtccccgccagattctgacgcggcatgccttcgaaaatgcgatcgcggtcacgatggccatcggagggacgaccaacgccgttctgcatctccttgccatcgcccgggcggtcgaggttccgctttcgatcgacgacttcgccgcaatccgggaacgggtccctgttctgtgcgatctcaagccatgggggcggtatgtggcaaccgaccttcaccgggcgggagggattccccaggtcatgaaaatcctgttgtcgaacggactgttgcatggggaagccctttccgtcaccggccggaccatcgcggaactgctggaaaacatcccggaagaccccccgaaagaagatcaggatgtgattcgtccgtttcgcgcgccggtcctcgaacgggggcatatcgccatcctccggggaaacctcgcccccgacggatcggtggccaaagtgacggcctcccgtcctgtggcattcacgggaccggcccgtgtcttcgattcggaagaagacggcatgaaggccattctggcaagagagatccgtccgggagatgtcgtagtcatccgttacgagggtcccgtgggaggaccgggcatgcgggaaatgctcgcaccgaccgccgcccttgtcggggaaggcctgggggagagcgtggcgctggtcacggatggacggttctccggaggaacccgggggatggtcgtgggtcatgttgcacccgaagcggccgtgggaggaccgatcgccctggttgccgacggcgatccggtcacggtcgaccccggacggagctgtctccggctcgatgtgccggaggaggaatttctccgccggcaggccgcatggcgtccccgtccgccccgcaccctccggggggttctggcgaagtacgcccggcaggtctcttcggccagcgaaggcgccgtcaccgactga

SEQ ID NO: 318 - protein, 558 aa, Leptospirillum sp.
MKDNRRSRVTTEGVERSPNRALLRATGFRDDDFGKPIVGVANAHSSITPCNMGIGKLASRAEEALRKAGSMPQTFGTITVSDGISMGTEGMKYSLVSREVIADSIETVVNAQSMDGLLAFGGCDKNMPGALIAMGRLDIPSVFVYGGTIRPGHHNGQDLTVVSAFEAVGEYLANRIDREELLAIERHACPGAGSCGGMFTANTMAALIETMGMSLPYSSTMAAEDAEKSENAEESAKILVNAIRNQIRPRQILTRHAFENAIAVTMAIGGTTNAVLHLLAIARAVEVPLSIDDFAAIRERVPVLCDLKPWGRYVATDLHRAGGIPQVMKILLSNGLLHGEALSVTGRTIAELLENIPEDPPKEDQDVIRPFRAPVLERGHIAILRGNLAPDGSVAKVTASRPVAFTGPARVFDSEEDGMKAILAREIRPGDVVVIRYEGPVGGPGMREMLAPTAALVGEGLGESVALVTDGRFSGGTRGMVVGHVAPEAAVGGPIALVADGDPVTVDPGRSCLRLDVPEEEFLRRQAAWRPRPPRTLRGVLAKYARQVSSASEGAVTD

SEQ ID NO: 319 - DNA, 1698 bp, Halorhodospira halophila
atggcggataaccgtcgcagccgagtgatcacccagggcgtggcccgaacccccaaccgcgcgatgctgcgcgccgtcggtttccgggatgaggatttcgagaagccgatcatcggggtcggcaacgcgcacagtacgatcaccccctgcaacgtcgggatcggcgccatggcgcggcgcgccgaggaggcgctgcgcgaggtgggggcgatgccgatgaagttcggcaccatcaccgtctccgacgggatcaccatgggcaccgagggcatgaagtactccctggtctcccgcgaggtgatcgccgattcgatcgagacggtgggcggtggccagcggatggacggcatgctcgccactggtggctgcgacaagaacatgcccggggcgatgatggccctggcccgtctggatatcccgggtatcttcgtctatggcggcaccatcaagccgggtcattacaagggcgaggatctcaccgtggtcagcgccttcgaggcggtggggcagtacaacgccggcaacctctccgaggccgatctcaagggggtcgaggagaacgcctgccccggggcgggcgcctgtggcggcatgttcacggccaacaccatgtccagcgccttcgaggccatgggcatgagcctgatgggctcgtccaccgtctctgccgaggacgacgaggcccgggatgtggccgccgaggcgtcccgggtcctgatggacgctgtccatcacgaccggcgcccgtcctcgatcctcacccgcgaggccttcgagaacgcctttgcggtggtgatggccctgggcggctccactaacgccgtgctccacctgctggccatcgccaataccgccgaggtgccgttcgacctcgacgacgtcgagcgcatccgccgcaaggtgccggtactctgcgacctcaagccgtcgggccggttcgtgaccagtcagttccacgaggtcggcggcacgccgcaggtgatgcgcatcctcctggagcaggggctgttgcacggccactgccagaccatcaccgggcagaccatcgaggccctcatcggccacctgccgccggagccgccggcggatcaggagatcatcatgcccttcgatcggccgctctatcccgagggtcacctggcaatcctgcggggcaacctggctgaagagggtgccgtggccaaggtcagtggcatccaacagcgccgtatcagcggaccggcccgcgtgttcgattccgaggaggagtgcctggaggccatcctggccgacggggtgcaggccggtgacgtggtgatcgtccgctacgaggggcccaagggagggcccggcatgcgcgagatgctggcgcccacctcggcgatcatcggcaaggggctcggcgatgcggtggggctgatcactgacggccgtttctccggcgggacctacgggatggtggtcgggcacgtggcgcctgaggcctacgacggcgggaccatcgcgctgattgccgagggcgatacggtgaccatcgacgccgaccagaacctgcttcaggtggaggtggatgacgcggagctcgagcgtcgccgcagccagtggcaggtgccccggcctcgctaccgtcgcggggtgttgggcaagtatgcgcgcctggcggcctcggccagtcgcggtgcagtgaccgacgccgacctcttccccgagcaggagtag

SEQ ID NO: 320 - protein, 565 aa, Halorhodospira halophila
MADNRRSRVITQGVARTPNRAMLRAVGFRDEDFEKPIIGVGNAHSTITPCNVGIGAMARRAEEALREVGAMPMKFGTITVSDGITMGTEGMKYSLVSREVIADSIETVGGGQRMDGMLATGGCDKNMPGAMMALARLDIPGIFVYGGTIKPGHYKGEDLTVVSAFEAVGQYNAGNLSEADLKGVEENACPGAGACGGMFTANTMSSAFEAMGMSLMGSSTVSAEDDEARDVAAEASRVLMDAVHHDRRPSSILTREAFENAFAVVMALGGSTNAVLHLLAIANTAEVPFDLDDVERIRRKVPVLCDLKPSGRFVTSQFHEVGGTPQVMRILLEQGLLHGHCQTITGQTIEALIGHLPPEPPADQEIIMPFDRPLYPEGHLAILRGNLAEEGAVAKVSGIQQRRISGPARVFDSEEECLEAILADGVQAGDVVIVRYEGPKGGPGMREMLAPTSAIIGKGLGDAVGLITDGRFSGGTYGMVVGHVAPEAYDGGTIALIAEGDTVTIDADQNLLQVEVDDAELERRRSQWQVPRPRYRRGVLGKYARLAASASRGAVTDADLFPEQE

SEQ ID NO: 321 - DNA, 1689 bp, Nitrococcus mobilis
atggccgataatcgccgcagccgcgtgatcacctacggtgtggcccgtacgcctaatcgggccatgctgcgcgctgtcggttttaccgacactgatttcgataaaccgatcgttggagtgggcaatgcccacagcaccatcacaccctgtaatgtgggcatcggtgcattagcggctcaggccgaacaggcgctgcgtgaagccggtgccatgccggtcagctttggcaccatcactatttctgatggtatatccatgggcacggaggggatgaagtactcgctggtctcgcgcgaggtcatagccgatgccatcgaaacggtaggcaacggccagtgcctggatggcatgctcgccaccggtggttgcgacaagaacatgccgggcgccatgattgccatagcacgcatgaatattccggcgatcttcgtttatggcggcaccatcaagccgggtcgctataagggtcaggatctgaccatcgtcagcgctttcgaggcggttggacagtatgccgccggcaaactctcagtcgaggatttgcagggcgtggaacgcaacgcttgccccggtgccggtgcctgcggcgggatgtacacggctaataccatgtccagcgccttcgaggccttgggtatgagcctgatgggctcctccaccctgtgcgcggaggatccggagaaagtgcagagtgcgcggcgctcggctcaagtcctggtagacgccatccaggaacagcgtttaccgcgtgccataatgacccgccaggcgttcgaaaacgcctttgcggtggtcatggcgctcggcggatcgaccaatgccgtgctgcatttgttggcgatcgccaacgctgcggaggtcgattttagcattgacgatgtcgaaaccatccgccgccaggtgcccgtgctctgcgagctcaagccctccgggcgcttcgtaaccagccagtttcatgaggtcggcggtactccgcaggtcatgaagatccttttggcccacggcttattgcacggcgcttgccttactgtttccgggcattctattgctgaattgttggccgacataccggccgagccgccgagcgaccaggatatcattcggcctttcaagcagccgctgtacccgcagggacatctcgccatcctgcgcggcaatctggcggaggagggtgccgtcgccaaggtcaccggcatcaaacagcgccggatcacaggtccggcacgggttttcgactccgaagagggtgccctggaggcgattctggcggatcaaatcgtggcgggtgacatcgtcgtgattcgttatgagggcccgaagggtgggccgggcatgcgcgagatgctggcgccgacctcggcgatcatcggtaaaggtttgggtgatgcggtaggtcttattaccgacgggcgcttctccggtggtacctatgggatggtggtcggtcatgttgcaccagaggcggcagtcggcggtacgattgccttggtgcgggagggtgatgaaatcacgatcgatgccgatcgcaatctgctgatgctccatgtcgccgacacggaaattgtccagcgccgagccgcctggcagccgccacggcctatttatcgtcgcggtgtgctcgcgaagtacgccaagttggtctcctcggcgagcattggagcggttacggacaaagatctattcgactga

SEQ ID NO: 322 - protein, 562 aa, Nitrococcus mobilis
MADNRRSRVITYGVARTPNRAMLRAVGFTDTDFDKPIVGVGNAHSTITPCNVGIGALAAQAEQALREAGAMPVSFGTITISDGISMGTEGMKYSLVSREVIADAIETVGNGQCLDGMLATGGCDKNMPGAMIAIARMNIPAIFVYGGTIKPGRYKGQDLTIVSAFEAVGQYAAGKLSVEDLQGVERNACPGAGACGGMYTANTMSSAFEALGMSLMGSSTLCAEDPEKVQSARRSAQVLVDAIQEQRLPRAIMTRQAFENAFAVVMALGGSTNAVLHLLAIANAAEVDFSIDDVETIRRQVPVLCELKPSGRFVTSQFHEVGGTPQVMKILLAHGLLHGACLTVSGHSIAELLADIPAEPPSDQDIIRPFKQPLYPQGHLAILRGNLAEEGAVAKVTGIKQRRITGPARVFDSEEGALEAILADQIVAGDIVVIRYEGPKGGPGMREMLAPTSAIIGKGLGDAVGLITDGRFSGGTYGMVVGHVAPEAAVGGTIALVREGDEITIDADRNLLMLHVADTEIVQRRAAWQPPRPIYRRGVLAKYAKLVSSASIGAVTDKDLFD

SEQ ID NO: 323 - DNA, 1692 bp, Alkalilimnicola ehrlichei
atgagtgagaaccgccgcagtcgggtcgtgaccgcaggcctgcgccgcacccccaaccgggccatgctgcgcgccaccggcttccgggacgaggacttcgacaagcccatcatcggcgtcgccaacgcccacagcaccatcaccccctgcaacatgcatatcgccgcgctcacccggcgggcggtggaggcgttgcaggcggccggtgccatggcaccggaatttggcgtgcccaccgtctcggacggcatcgccatgggcacgccggggatgcgctactcgctggtctcgcgcgaggtgatcgccgacgccatcgagacggtgtgcgagggccagagcctggacggcgtgctggccaccggcggctgcgacaagaacatgcccggggctatgatcgccatcgcgcgcatgaacataccggccctgtttgtctacggcggcaccatccgccccggctactacaagggcgagcggctggacatcgtctcggcgttcgaggcggtgggccaggcctccgcgggcaggatgagtgacgaggacctgcttggggtggagcgcaacgcctgccccggcgccggctcctgtggcgggatgtacaccgccaacaccatgtccagcgccttcgaggccatgggcatgagcctgcccgccagctccaccgtggccgccgaggcggaggagaagggcgacgacgtggcggccgccgcgcgggtgctgatggaggcggtgcgggcggatcgcaagccccgcgacatcctcacccgcgaggccttcgagaacggcttcgccctggtgatggccgtgggcgggtccaccaacgcggtgctgcacttgctggccatcgccgatgcggccgatgtgccgttgtcgctggacgacgtggagcgtatccggcagcaggtgcccgtgctctgcgatctgcggccctcgggccgctacgtgaccactgaatttcacgaggtgggcggcacgccgcaagtgctgcgcctgctgctggacgcgggcctgctccacggcgactgcctcactattaccgggcagacgcttgccgagaccctggccgacgtgcccccgacccccgcgaaggatcaggacatcatccggaccctggacaaccccctctacccggtgggccatctggccatcctgcgtggaaacctggcagaggagggggccgtggccaaggtgtccggccttaagcagcgccgcatcgtcggaccggcgcgggtattcgagggtgaggaggactgcctggaggcgatcctggccggccagattaagcccggcgacgtggtggtcatccgccacgaggggccgaagggcgggcccggcatgcgcgagatgctctcgcccaccgcggcgttgatgggggccgggctgggggagagcgtcggcctgatcaccgatgggcgcttctccggtggcacccgggggctggtggtgggccacgtggcgccggaggccgcagcgggtggcaccatcgccctggtccgggaaggcgacaccgtcaccatcgatgcggacgccaaccggctcaccctggaggtggacgaggcggagctcgcccgccggcgtgcggcctggcagccgccggaaccgagagcgacccggggcgtattgggcaagtacgcgcagatggtcggctcggcggcgcagggtgcggtcaccgatcgctggagcggcggcgcgtga

SEQ ID NO: 324 - protein, 563 aa, Alkalilimnicola ehrlichei
MSENRRSRVVTAGLRRTPNRAMLRATGFRDEDFDKPIIGVANAHSTITPCNMHIAALTRRAVEALQAAGAMAPEFGVPTVSDGIAMGTPGMRYSLVSREVIADAIETVCEGQSLDGVLATGGCDKNMPGAMIAIARMNIPALFVYGGTIRPGYYKGERLDIVSAFEAVGQASAGRMSDEDLLGVERNACPGAGSCGGMYTANTMSSAFEAMGMSLPASSTVAAEAEEKGDDVAAAARVLMEAVRADRKPRDILTREAFENGFALVMAVGGSTNAVLHLLAIADAADVPLSLDDVERIRQQVPVLCDLRPSGRYVTTEFHEVGGTPQVLRLLLDAGLLHGDCLTITGQTLAETLADVPPTPAKDQDIIRTLDNPLYPVGHLAILRGNLAEEGAVAKVSGLKQRRIVGPARVFEGEEDCLEAILAGQIKPGDVVVIRHEGPKGGPGMREMLSPTAALMGAGLGESVGLITDGRFSGGTRGLVVGHVAPEAAAGGTIALVREGDTVTIDADANRLTLEVDEAELARRRAAWQPPEPRATRGVLGKYAQMVGSAAQGAVTDRWSGGA

SEQ ID NO: 325 - DNA, 1695 bp, Deinococcus geothermalis
atgacggacacccgcaccaagcgcagaatgaactggaacagtcaccacatcacgcagggtgacgagcgggcgcccaaccgcgcgatgctgcgggcggtgggcttcgaagacggcgacttcgacaaggcgatcatcggggtggcgcacgcccagagcaacatcacgccctgtaacaacgggctgggcgaactcgccgaccacatcaccggtgcgcttcgcgagggcggagcgatgccgcaggtgtacggcaccatcacggtgtctgacggcatcagcatgggcaccgagggcatgaagtgctctcttgtcagccgggaagtgatcgcagactccatcgaaaccgtctcgcgtgggcaatcgcacgacggcctgattgtggtgggcggctgcgacaagaatatgcccggcgcaatgatcggcatcgcccggttgaatattcccgcgatcttcgtgtacggcgggaccatcaaaccggggcactatcagggcaaagacctcaccatcgtttcggtcttcgaggcggtgggggcctacggcgcgggcaagatgagccgcgaggacttcgagcagatcgagaaacgcgcctgtcccggcaacggttcctgtggcggcatgtacaccgccaacaccatgagcagtgccttcgaggcgatgggcatgagcctgccctattcgtccaccatgagtgccgtggacgccgaaaaggccgtttcggctgcggacagcgcccgcgccctgatccggttgatcgagcaggacatccgcccgctggacatcctgacgaaaaaagcctttgagaacgccatcacggtggtcatggcggtgggcggctcgaccaacgccgtgctgcacctgatggcgattgcccacgcctgcggtgttgacctcacgctggaagacttcgagcgcattcgcgagcgcacgccggtcttctgtgaccttaagcccagtggaaagtacgtcgccacggatctgcacgaggtcggcggcattccgcgcgtgatgaagatgctgctcaaagcgggcttgctgcacggcgactgcctgacagtgaccggacagacggtggccgagaacctggcggacgtgcccgaccagcccgaccccggccaggacgtcattctgcccttcgatcagccgctctactcgcaggggcacctcgccatcttgcggggcaacctggccccggaaggcagtgtcgccaagatcagcggcctgcggcagatcaagatcaccggtcccgcccgcgtctttgattcggaagaagagtgcatggcggcgatcatgggcgatcagatcaaggccggtgacgtgatcgtgattcgctacgaaggccctaagggcggccccggcatgcgcgagatgctctcgcccaccagcgcgatcatcggcaaaggcctgggcgacagcgtggggctgatcacagacggacgcttcagcggcggcacctacggcctggtggttggccacgtcgcgcccgaagcctatgtaggcggccccatcgcgctggtgcaggaaggcgacatcatcgagctgaacgccgaaacctgcgagctgacgctgcatgtggacgacgcagaactggagcgccgccgcgccgcgtgggtggccccggaaccgcgctaccggcggggcgtcctggcaaagtacgcgcgactagtaggcagtgcggcgcggggagcggtgaccgattag

SEQ ID NO: 326 - protein, 564 aa, Deinococcus geothermalis
MTDTRTKRRMNWNSHHITQGDERAPNRAMLRAVGFEDGDFDKAIIGVAHAQSNITPCNNGLGELADHITGALREGGAMPQVYGTITVSDGISMGTEGMKCSLVSREVIADSIETVSRGQSHDGLIVVGGCDKNMPGAMIGIARLNIPAIFVYGGTIKPGHYQGKDLTIVSVFEAVGAYGAGKMSREDFEQIEKRACPGNGSCGGMYTANTMSSAFEAMGMSLPYSSTMSAVDAEKAVSAADSARALIRLIEQDIRPLDILTKKAFENAITVVMAVGGSTNAVLHLMAIAHACGVDLTLEDFERIRERTPVFCDLKPSGKYVATDLHEVGGIPRVMKMLLKAGLLHGDCLTVTGQTVAENLADVPDQPDPGQDVILPFDQPLYSQGHLAILRGNLAPEGSVAKISGLRQIKITGPARVFDSEEECMAAIMGDQIKAGDVIVIRYEGPKGGPGMREMLSPTSAIIGKGLGDSVGLITDGRFSGGTYGLVVGHVAPEAYVGGPIALVQEGDIIELNAETCELTLHVDDAELERRRAAWVAPEPRYRRGVLAKYARLVGSAARGAVTD

SEQ ID NO: 327 - DNA, 1695 bp, Polynucleobacter sp.
atgaaacgcctcaatgaacgctctcgcatggttaccgagggggtcgctcgcgcacccaatcgttcgatgtactacgcgatgggttacgaagaaaaggatttcgtaaaaccaatggttggcgttgcaaacggccactccactattaccccttgcaatagtggcttacaaaaattagctgatgccgcagttgaagctctagaagcagctggcgcaaaagcacaagtatttggtacgccaaccgtttctgatggtattggtatgggtactgagggtatgaagtattccctcgtctcacgagaagtgattgctgacagtattgaagtttgtgtaaacggtctttggcaagatggcgtagtagtcattggtggctgcgataaaaatatgcctggtggcatgatggctttagctcgcacgaatgtacctggcatctatgtatatggtggcacgattaagccaggccactttaaaggcaaggaattgaatattgtttctgcatttgaagcagttggtgaatttacctccggtcgattgagtgaagaagatttaaaaggtgttgagcaacacgcctgcccaggtagcggctcttgcggtggaatgtacacggccaataccatgagctcttcatttgaggctttgggtatgagcttgccctactcttctacgatggcaaacgttgacgctgaaaaagtagcgagcgctgccgaatcagcgcgcgtcctcgttgaagccgttaaaaacaacctgcgcccacgcgacatcattaccaagaaatccgttgagaatgcggttagcgtcatcatggcagttggcggttcaaccaatgcagtgttgcatttcttggcgattactagtgccgctgaaattgattggacaattgatgactttgaacggattcgtaagcaagtcccagtcatcgttgatatgaaaccctctggcacttatttagcaactgacttacaccaagctggcggtattccacaagtcatgaagattttgcttgacggtggcctgcttcatggcgattgcatcaccattaccggaaaaactattgctgaagtattaaaagatgttccatcagtgccgcgcgctgatcaaaaagtcattcgcacgctagacaacccactctacaagcaaggtcacttagcgattctgaagggcaatatttctccagaagggtgcgttgccaaaattactggcctcaagaatccatcgattactggcccagctcgagtctttgattctgaagatgatgcgatggctgccatcatggctcagaagatcaaagatggcgacatcgtggtgattcgttacgaaggccctaaaggcggtcctggtatgcgtgaaatgcttgcccctacctctgccctagttggtcaaggtttaggcgagtcagttggcctcatcaccgatggtcgcttctctggtggtacttggggcatggtagttggtcacgttgctcctgaggcctttgtagggggcacaattgccctcatcaacgaaggtgactcagtcacgatagatgctcaccaacttcttattcagctcaacgtcagcgaagaagaaattgctaagcgacgcgcagcttggaaacaacctaagccacgctatacccgcggcttacttgcgaagtatgcaagccttgctagtagtgcgagcaaaggtgctgtaaccgatttgaatttagatttgacctaa

SEQ ID NO: 328 - protein, 564 aa, Polynucleobacter sp.
MKRLNERSRMVTEGVARAPNRSMYYAMGYEEKDFVKPMVGVANGHSTITPCNSGLQKLADAAVEALEAAGAKAQVFGTPTVSDGIGMGTEGMKYSLVSREVIADSIEVCVNGLWQDGVVVIGGCDKNMPGGMMALARTNVPGIYVYGGTIKPGHFKGKELNIVSAFEAVGEFTSGRLSEEDLKGVEQHACPGSGSCGGMYTANTMSSSFEALGMSLPYSSTMANVDAEKVASAAESARVLVEAVKNNLRPRDIITKKSVENAVSVIMAVGGSTNAVLHFLAITSAAEIDWTIDDFERIRKQVPVIVDMKPSGTYLATDLHQAGGIPQVMKILLDGGLLHGDCITITGKTIAEVLKDVPSVPRADQKVIRTLDNPLYKQGHLAILKGNISPEGCVAKITGLKNPSITGPARVFDSEDDAMAAIMAQKIKDGDIVVIRYEGPKGGPGMREMLAPTSALVGQGLGESVGLITDGRFSGGTWGMVVGHVAPEAFVGGTIALINEGDSVTIDAHQLLIQLNVSEEEIAKRRAAWKQPKPRYTRGLLAKYASLASSASKGAVTDLNLDLT

SEQ ID NO: 329 - DNA, 1692 bp, Polynucleobacter necessarius
atgaaacgcctaaatgaacgctcgcgcatggtcacagaaggggtcgcacgcgcacctaatcgttcgatgtattacgcaataggttacgaagaaaaggatttcgtaaagccaatggttggcgttgcgaatggtcactccactatcaccccttgtaatagtggtttacaaaaattagccgatgctgcagtttctgcgcttgaaggtgctggtgcaaaagcacaaatgtttggcaccccaaccgtttccgatggcataggcatgggcacagaaggcatgaagtattcactcgtgtcacgcgaagtgattgctgacagtattgaaacttgtgtaaatggactgtggcaagacggtgtagttgtgattggcggctgcgataaaaatatgccaggcggcatgatggctttagctcgcaccaatgtgcccggcatctatgtatatggcggcacaattaagccaggccactacaaaggtaaagaccttaatatcgtttcagcgtttgaagcagttggtgaatttacctccggcagactcagcgaagaggatttaaaaggtgtagaacaacatgcctgtccgggtagcggctcctgcggtggtatgtataccgccaacacaatgagctcggcctttgaggccttaggcatgagcctcccctactcctcaacgatggcaaacgaagatgcagaaaaagtagcaagcacacatgattctgctgtcgtattggttgaagcgatcaaaaagaacttgcgtccacgcgacatcattaccaagaaatcgattgagaacgctgttagcgtaatcatggctgttggtggatctacaaatgcggtgctgcatttcttggcgattactagcgccgctgaaatcgattggaccattgatgattttgaacgcattcgtaagcgcgttcctgtaatcgtggatatgaaaccatcgggcacctaccttgctaccgatttgcatcaagctggcggcattcctcaagtgatgaagattttgctcgacgacggattgctccacggcgattgcatgactatcactggcaaaacagttgcggaagtgttgaaagatgttccatccgtaccgcgcgccgatcagaaagtgatccgtaccttagataatcctttgtataaacaaggtcacttggcaatcttgaaaggcaatatctcaccagagggttgtgtgaccaagataaccggcctcaaaaatccatcgatcaccggcccagcacgcgtctttgattctgaagatgatgctatggcagccatcatggcacagaagattaaagatggtgacatcgtggtcattcgctatgaaggccctaaaggcggccctggtatgcgcgaaatgcttgcccccacctctgccctagttggtcaaggtttaggcgaatctgtggggcttattaccgatggccgcttctctggtggcacttggggcatggtcgttggccacgtggcaccggaagcttatgtcggtggaaccatcgccctcattcatgagggtgactctgtcacgatcgatgcgcataagctactcattcagctgaatgtagatgatgcagagatcgctaaacgtcgcgcagcctggaagcaacccaagccacgctacacccgcggcttgcttgcaaagtatgccaaacttgctagcaccgcaagcaaaggggcggtgaccgacttaaatttgaatgattag

SEQ ID NO: 330 - protein, 563 aa, Polynucleobacter necessarius
MKRLNERSRMVTEGVARAPNRSMYYAIGYEEKDFVKPMVGVANGHSTITPCNSGLQKLADAAVSALEGAGAKAQMFGTPTVSDGIGMGTEGMKYSLVSREVIADSIETCVNGLWQDGVVVIGGCDKNMPGGMMALARTNVPGIYVYGGTIKPGHYKGKDLNIVSAFEAVGEFTSGRLSEEDLKGVEQHACPGSGSCGGMYTANTMSSAFEALGMSLPYSSTMANEDAEKVASTHDSAVVLVEAIKKNLRPRDIITKKSIENAVSVIMAVGGSTNAVLHFLAITSAAEIDWTIDDFERIRKRVPVIVDMKPSGTYLATDLHQAGGIPQVMKILLDDGLLHGDCMTITGKTVAEVLKDVPSVPRADQKVIRTLDNPLYKQGHLAILKGNISPEGCVTKITGLKNPSITGPARVFDSEDDAMAAIMAQKIKDGDIVVIRYEGPKGGPGMREMLAPTSALVGQGLGESVGLITDGRFSGGTWGMVVGHVAPEAYVGGTIALIHEGDSVTIDAHKLLIQLNVDDAEIAKRRAAWKQPKPRYTRGLLAKYAKLASTASKGAVTDLNLND

SEQ ID NO: 331 - DNA, 1704 bp, Azoarcus sp.
atgtccgaccctacccgtccagcccggatcgatgaacgttcccgcaacgtgaccgaaggcgtgatgcgggcgcccaatcgatcgatgtactacgcgatgggctatcgggaaactgatttcggcaagccgatggttggcgtggcgagcgcacattcgacgatcacgccctgcaacagcgggctgcaaccgctggccgataccgtggccgcggccttgaaggaggccggggccaatccgcaactgttcggtactcccaccgtgtccgacggcatcggcatgggcaccgagggcatgaagtattcgctggtatcgcgggaagtgatcgccgacagcatcgagacctgcgtcaatgggctgtggcaggacggggtcgtcgtgatcggcggatgcgacaagaacatgcccggcggcatgatggcgcttgtccgcaccaacgtgcctggaatctatgtctatggcggcacgatcaaaccggggcattacaagggcagggatctgaacatcgtctcggttttcgaggcggtgggggaattcatcgcggggcagctcgacccggtcgatttcaaggaaatcgaaaagcgcgcctgccccggcagcggctcgtgcggcgggatgtacacggcaaacacgatgagcgccgcgttcgaggcgctcggcatgagcctgccatattcttcgacgatggccaacgaggacgctgagaagctcgcgagcgccgcggagtccgcccgggtgctggtggaggcgatcaaacgcggccttcgcccgcgcgacatcgtcacccgggaggcgatcgagaacgctgtcagcgtgatcatggcgacgggaggctcgaccaacgcggtgctgcactttctggcgattgcccacgcggccgaagtgccgtggacaatcgacgacttcgagcgcattcggcgtcgcgtgccggtcatcgtcgacatgaagccgtccgggcgctacctcgcgaccgatctccatcaggcaggcggcatcccgcaggtgatgaagctgctgctcgacgccgggctgctgcatggcgcgtgcgtcacgatcaccgggcagacgatcgcggaggtcctggagaacgtgccggcggcaccgcgtgccgatcagggcgtcatccggacgctgtccgatccgctgtacgcggagggccatctggcgatcctcaggggcaacctctcgccggaaggctgcgtggcgaagatttcgggcctgaagaatcccgccatcaccggcccggcgcgcgtcttcgactccgaggacgacgcgatggcggcgatcatggcgcgccggatcgtggagggtgacgtcgtggtaatccgctacgagggacccaagggcggccccggcatgcgcgagatgctcgccccgacgtcggcgctcgtcgggcaggggctgggagagtcggtcgggctgatcactgacggccgcttctcgggaggcacctggggcatggtcgtcggccacgtttcccccgaagcgttcgtcggtggcccgattgcgctggttcgcgaaggggactcggtcacgatcgacgcgcaccggcagctcgtccagctgaatgtcggtgatgaagagctcgcgcgccgagccgccgactggacgccgccgtccccgcgctacacccgcggcgtgctggcgaagtttgcgaagttcgccagttccgcgagcaagggcgcggttaccgatctggacttgtag

SEQ ID NO: 332 - protein, 567 aa, Azoarcus sp.
MSDPTRPARIDERSRNVTEGVMRAPNRSMYYAMGYRETDFGKPMVGVASAHSTITPCNSGLQPLADTVAAALKEAGANPQLFGTPTVSDGIGMGTEGMKYSLVSREVIADSIETCVNGLWQDGVVVIGGCDKNMPGGMMALVRTNVPGIYVYGGTIKPGHYKGRDLNIVSVFEAVGEFIAGQLDPVDFKEIEKRACPGSGSCGGMYTANTMSAAFEALGMSLPYSSTMANEDAEKLASAAESARVLVEAIKRGLRPRDIVTREAIENAVSVIMATGGSTNAVLHFLAIAHAAEVPWTIDDFERIRRRVPVIVDMKPSGRYLATDLHQAGGIPQVMKLLLDAGLLHGACVTITGQTIAEVLENVPAAPRADQGVIRTLSDPLYAEGHLAILRGNLSPEGCVAKISGLKNPAITGPARVFDSEDDAMAAIMARRIVEGDVVVIRYEGPKGGPGMREMLAPTSALVGQGLGESVGLITDGRFSGGTWGMVVGHVSPEAFVGGPIALVREGDSVTIDAHRQLVQLNVGDEELARRAADWTPPSPRYTRGVLAKFAKFASSASKGAVTDLDL

SEQ ID NO: 333 - DNA, 1674 bp, Burkholderia phymatum
atgccgtacaaccgtcgttcgaagaacatcacgcaaggcgtcgcgcgttcgccgaaccgctcgatgtattacgcgctcggctaccagaaggcagacttcgacaagccgatgatcggcatcgccaacggccactcgaccatcacgccgtgcaacgcgggcctgcaacgactcgccgacgccgccgtcgaagccgtcaagcgcagcgatgcgaatccgcagaccttcggtacgccgaccatttcggacggcatgtcgatgggcacggagggcatgaagtactcgctcgtgtcgcgcgaagtgatcgccgactgcatcgagacctgcgtgcaggggcaatggatggacggcgtcgtcgtgatcggcggctgcgacaagaacatgccgggcggcatgatcggcctcgcgcgaatgaacgtgccaggcatctacgtgtacggcgggaccatcaagccgggcaactggaaaggcaccgacctgactatcgtgtcgtcgttcgaggcagtgggcgaattcacggcgggccgcatgtcgcaagaagacttcgaaggggtcgaacagaacgcctgcccgagcacgggctcgtgcggcggcatgtacacggccaacacgatgagctcgtcgttcgaagcgctcggtatgtcgctgctgtactcgtcgacaatggcgaacccggatcaggagaaagtggattcggcggccgagtcggcgcgcgtgctggtcgaagccgtcaagcaggatctcaagccgcgcgacatcattacgaagaagtcgatcgaaaacgccgttgcgctgatcatggcgacgggcggctcgacgaacgccgtgctgcactatctggccattgcgcacgcggcggaagtggactggtccatcgaagatttcgagcgcatgcgcaagaaagtgcccgtcatctgcgatctcaagccgtcgggcaagtatgtcgccaccgatctgcacaaggccggcggcatcccgcaggtgctgaagctgctgctcgatgcaggcctgctgcacggcgactgcatcacgatcacgggcaagacgatcgccgaagagctgaaggacgtgccagccaaaccgcgcgcggaccagaaggtgatctatccgatcgacaaggcgctttacagcgaaggccatctcgcgattctcaagggcaacctcgcggaagacggcgcggtcgcgaagatcaccgggctgaagaaccccgtcatcacagggcccgcacgcgtgttcgacgacgagcaaagtgcgatggaagccatcctcgccgaccagatcaaggcaggcgatgtcgtcgtgctgcgctatctcggcccgcaaggcggccccggcatgccggaaatgctggcgccgacctcggcgatcatcggcaagggtctcggcgaatcggtcggtcttatcacggatgggcgcttctcgggcggcacctggggcatggtggtgggtcacgtcgcgccggaagcgttcgtcggcggcacgatcgcactcgtgcaggaaggcgattcgatcaccatcgacgcccacaagctgctgttgcaactgaacgtcgacgacggcgaactgcagcgccgccgcgccgcatggaagcagcccgcgccgcgctatacgcgcggcgtgctggccaagttcgcggcgctcgcgaagccggccaacaagggcgccgtcaccggctga

SEQ ID NO: 334 - protein, 557 aa, Burkholderia phymatum
MPYNRRSKNITQGVARSPNRSMYYALGYQKADFDKPMIGIANGHSTITPCNAGLQRLADAAVEAVKRSDANPQTFGTPTISDGMSMGTEGMKYSLVSREVIADCIETCVQGQWMDGVVVIGGCDKNMPGGMIGLARMNVPGIYVYGGTIKPGNWKGTDLTIVSSFEAVGEFTAGRMSQEDFEGVEQNACPSTGSCGGMYTANTMSSSFEALGMSLLYSSTMANPDQEKVDSAAESARVLVEAVKQDLKPRDIITKKSIENAVALIMATGGSTNAVLHYLAIAHAAEVDWSIEDFERMRKKVPVICDLKPSGKYVATDLHKAGGIPQVLKLLLDAGLLHGDCITITGKTIAEELKDVPAKPRADQKVIYPIDKALYSEGHLAILKGNLAEDGAVAKITGLKNPVITGPARVFDDEQSAMEAILADQIKAGDVVVLRYLGPQGGPGMPEMLAPTSAIIGKGLGESVGLITDGRFSGGTWGMVVGHVAPEAFVGGTIALVQEGDSITIDAHKLLLQLNVDDGELQRRRAAWKQPAPRYTRGVLAKFAALAKPANKGAVTG

SEQ ID NO: 335 - DNA, 1674 bp, Burkholderia xenovorans
atgccatacaaccgtcgttcgaagaacatcacgcaaggtgtagcgcgttcgccgaatcgctcgatgtactacgcgctcggctacgaaaaagccgacttcgacaagccgatgatcggcatcgccaacggtcactcgaccatcacgccgtgcaacgcgggcctgcagcgtctcgccgatgccgcggtcgccgcgatcaaaggcgccgacgcgaacccacagatcttcggcacgccgacgatctcggacggcatgtcgatgggcaccgagggcatgaagtactcgctggtgtcgcgcgaagtgatttccgactgcatcgagacctgcgtgcaaggccagtggatggacggcgtggtcgtgatcggcggctgcgacaagaacatgccgggcggcatgatcggcatgctgcgcaccaacgtgccgagcatctacgtgtatggcgggacgattcgtccgggcaactggaagggcaccgacctgaccatcgtgtcgtcgttcgaggccgtgggcgaattcaccgccggccggatgtcgcaggaagatttcgaaggggtcgaacagaacgcgtgcccatccaccgggtcgtgcggcggcatgtacaccgccaacaccatgagctcgtcgttcgaagcgctcggcatgtcgctgctgtattcgtccacaatggccaatccggatcaggaaaaagtcgactcggccgccgaatcggcacgcgtgctggtcgaagcggtcaagcaggatctcaagccgcgcgacatcgtgacccgcaagtcgatcgaaaacgccgtggccgtgatcatggccaccggcggctcgaccaatgccgtgctgcactttctcgccatcgcgcatgcggccgaagtggagtggagcatcgaggacttcgagcgcatgcgcaagaaggtgccggtgatctgcaacctgaagccgtcgggccagttcgtggcgaccgatctgcacaaggccggcggcattccgcaagtcatgaagatcctgctcgacgcaggtctgttgcacggcgattgcatcacgatcaccggccgaaccctcgcggaagagttgaaggacgtgccggccaggccgcgcgccgatcagcaggtgattttcccgatcgagcaggcgctgtacaaggaaggccatctcgcgatcctcaagggcaacctggccgtggacggcgcggtcgccaagatcaccggcctgaagaatcccgtgatcaccggcccggcgcgcgtgttcgacgacgagcaaagcgcgctggaagcgattctggccgacaggatcgtcgcgggcgacgtggtggtgctgcgctatctcggcccgaagggcggccccggcatgccggagatgctcgcgccgacctcggcgatcatcggcaagggactcggcgagagcgtggggctcatcaccgacgggcgcttctcgggtggcacgtggggcatggtggtcgggcacgtcgcgccggaagccttcgtgggcggcacgatcgcgttcgtgcaggaaggcgactcgatcaccatcgacgcgcacaagctgctgctgcaactgaatatcgacgacgccgaactggagcgacgccgtgccgcatggcagcagccgaagccgcgctacacacgcggcgtgctggcgaagtactccgcattggctctgccggccaataagggcgccgtgacgggctaa

SEQ ID NO: 336 - protein, 557 aa, Burkholderia xenovorans
MPYNRRSKNITQGVARSPNRSMYYALGYEKADFDKPMIGIANGHSTITPCNAGLQRLADAAVAAIKGADANPQIFGTPTISDGMSMGTEGMKYSLVSREVISDCIETCVQGQWMDGVVVIGGCDKNMPGGMIGMLRTNVPSIYVYGGTIRPGNWKGTDLTIVSSFEAVGEFTAGRMSQEDFEGVEQNACPSTGSCGGMYTANTMSSSFEALGMSLLYSSTMANPDQEKVDSAAESARVLVEAVKQDLKPRDIVTRKSIENAVAVIMATGGSTNAVLHFLAIAHAAEVEWSIEDFERMRKKVPVICNLKPSGQFVATDLHKAGGIPQVMKILLDAGLLHGDCITITGRTLAEELKDVPARPRADQQVIFPIEQALYKEGHLAILKGNLAVDGAVAKITGLKNPVITGPARVFDDEQSALEAILADRIVAGDVVVLRYLGPKGGPGMPEMLAPTSAIIGKGLGESVGLITDGRFSGGTWGMVVGHVAPEAFVGGTIAFVQEGDSITIDAHKLLLQLNIDDAELERRRAAWQQPKPRYTRGVLAKYSALALPANKGAVTG

SEQ ID NO: 337 - DNA, 1674 bp, Burkholderia multivorans
atgtcgtacaaccgtcgctcgaagcacatcacgcaaggcgtcgcccgctcgccgaaccgttcgatgtattacgccctcggctatcagaaggaagatttcgacaagccgatgatcggcatcgccaacgggcattcgacgatcacgccgtgcaacgcggggctgcagcgcctgtccgacgcggccgtcgaggcgatcaaggcggccggcgcgaatccgcagatcttcggcacgcccacgatctcggacggcatgtcgatgggcaccgaagggatgaagtactcgctcgtgtcgcgcgaggtaatcgccgactgcatcgagacctgcgtgcagggccaatggatggacggcgtcgtggtagtcggcggctgcgacaagaacatgccgggcgggatgatcgcgctcgcgcggctgaacgtgccgggcatctacgtgtacggcgggacgatccgccccggccactggaaaggcaaggatctgacgatcgtctcggcgttcgaggcggtcggcgaattcacggccgggcgcatgtcggacgaggatttcgagggcatcgagcgcaacgcgtgcccgacgtcgggctcgtgcggcggcatgtacaccgcgaacacgatgagctcgtcgttcgaggcgctcggcatgtcgctgatgtattcgtcgacgatggcgaaccccgatcaggaaaaggtcgattcggcggccgaatcggcgcgtgtgctcgtcgaagcggtgaagcgcgacctgaagccgcgcgacatcatcacgaagcagtcgatcgagaacgcggtgtcgctgatcatggcgaccggcggctcgaccaatgcggtgctgcactatctcgcgatcgcgcatgcggccgaggtcgactggacgatcgacgacttcgagcggatccgcaagcgcgtgccggtgatctgcgacctgaagccgtcgggccagtacgtcgcgaccgacctgcaccgtgcgggcggcattccgcaggtgctgaagatcctgctcgatgcgggcctgctgcacggcgactgcgtcacgatcaccggccgcacgctcgccgaagagctgaaggacgtgccgtccgtgccgcgcgccgatcagcaggtgatcttcccgatcgagcgcgcgctgtacaaggagggccatctcgcgatcctgaagggcaatctcgccgaggacggcgcggtcgcgaagatcaccggcctgaagaacccggtgatcacgggcccggcgcgcgtgttcgacgacgagcaaagcgcgatggacgcgatcctcggcgacaagatccgcgccggcgacgtgctcgtgctgcgctatctcggcccgcaaggcgggcccggcatgccggaaatgctcgcgccgacgtcggcgatcatcggcaaggggctcggcgaatcggtcggcttcatcaccgacggccgcttctccggcggtacgtgggggatggtcgtcggccacgtcgcgcccgaggcgttcgtcggcggcacgatcgcgctcgtgcaggaaggcgactcgatcacgatcgacgcgcataagctgctgctgcagctgaacgtcgacgatgcggaactcgcgcgccgccgcgccgcatggaagcagccggcgccgcgctacacgcgcggcgtgctcgccaagtatgccgcgctcgcacggccggcgaatcggggtgcggtcacggggtga

SEQ ID NO: 338 - protein, 557 aa, Burkholderia multivorans
MSYNRRSKHITQGVARSPNRSMYYALGYQKEDFDKPMIGIANGHSTITPCNAGLQRLSDAAVEAIKAAGANPQIFGTPTISDGMSMGTEGMKYSLVSREVIADCIETCVQGQWMDGVVVVGGCDKNMPGGMIALARLNVPGIYVYGGTIRPGHWKGKDLTIVSAFEAVGEFTAGRMSDEDFEGIERNACPTSGSCGGMYTANTMSSSFEALGMSLMYSSTMANPDQEKVDSAAESARVLVEAVKRDLKPRDIITKQSIENAVSLIMATGGSTNAVLHYLAIAHAAEVDWTIDDFERIRKRVPVICDLKPSGQYVATDLHRAGGIPQVLKILLDAGLLHGDCVTITGRTLAEELKDVPSVPRADQQVIFPIERALYKEGHLAILKGNLAEDGAVAKITGLKNPVITGPARVFDDEQSAMDAILGDKIRAGDVLVLRYLGPQGGPGMPEMLAPTSAIIGKGLGESVGFITDGRFSGGTWGMVVGHVAPEAFVGGTIALVQEGDSITIDAHKLLLQLNVDDAELARRRAAWKQPAPRYTRGVLAKYAALARPANRGAVTG

SEQ ID NO: 339 - DNA, 1686 bp, Burkholderia cenocepacia
atggagctccccatgtcgtacaaccgccgctctaagaacatcacgcaaggcgtggcccgttcgccgaaccgctcgatgtattacgccctcggctaccagaaggacgatttcgataaaccgatggtcggtatcgcgaacggccactcgacgatcacgccgtgcaattccggcctgcagcgcctgtcggacgcggccgtggatgccgtgaaggcggccggcgcgaacccgcagatcttcggcacgccgacgatttcggacggcatgtcgatgggcaccgaagggatgaagtactcgctcgtgtcgcgcgaagtgatcgccgactgcatcgagacctgcgtgcagggccagtggatggacggcgtggtggtggtcggcggctgcgacaagaacatgcccggcggcatgatcgcgctcgcacgcctgaacgtgccgggcatctacgtgtacggcggcacgatccgcccgggcaactggaagggccgcgacctgacgatcgtgtcgtcgttcgaggccgtcggcgaattcaccgcgggccggatgtcgcaggaagacttcgaaggcgtcgagaagaacgcgtgcccgacgtcgggttcgtgcggcggcatgtacaccgcgaacacgatgagttcgtcgttcgaggcgctcgggatgtcgctgctgtattcgtcgacgatggcgaaccccgaccaggaaaaagtcgattcggccgccgaatcggcacgcatgctggtcgaggcggtgaagcgcgacctgaagccgcgcgacatcatcacgaaggaatccatcgagaacgcggtgtcggtgatcatggccaccggcggctcgaccaatgcggtgctgcactatctcgcgatcgcgcacgcggccgaagtcgactggacgatcgacgacttcgagcgcattcgcaagcgcgtgccggtgatctgcgacctgaagccgtcgggacaatacgtcgcgaccgacctgcaccgggccggcgggattccgcaggtgctgaagatcctgctcgatgcagggctgctgcacggcgactgcatgacgatcaccggccgcacgatcgccgacgagctgaaggacgtgccggccgtgccgcgcgcggaccagcatgtgatcttcccgatcgaccgcgcactgtacaaggaaggccacctcgcgatcctgaagggcaatctcgcggaagacggcgcggtcgcgaagatcaccggcctgaagaacccggtgatcacgggcccggcgcgcgtgttcgacgacgaacagagcgcaatggacgcgatcctcggcgaccggattcgcgcgggcgacatcctcgtgctgcgctacctcggcccgcagggtggccccggcatgccggaaatgctcgcgccgacttccgcgatcatcggcaaggggctcggcgaatcggtcggcttcatcacggacggacgcttctcgggcggcacttggggcatggtggtcggccacgtcgcgccggaggcgttcgtcgggggcacgatcgcgctggtgcaggaaggcgattcgatcacgatcgacgcgcaccggctgctgctgcaactgaacgtcgacgaggcggaactcgcacggcgccgtgccgcgtggcgacagccggcgccgcgctatacgcgcggggtgctcgcgaaattcgcggcgctcgcccgaccggcgaaccagggagcggtcacgggttga

SEQ ID NO: 340 - protein, 561 aa, Burkholderia cenocepacia
MELPMSYNRRSKNITQGVARSPNRSMYYALGYQKDDFDKPMVGIANGHSTITPCNSGLQRLSDAAVDAVKAAGANPQIFGTPTISDGMSMGTEGMKYSLVSREVIADCIETCVQGQWMDGVVVVGGCDKNMPGGMIALARLNVPGIYVYGGTIRPGNWKGRDLTIVSSFEAVGEFTAGRMSQEDFEGVEKNACPTSGSCGGMYTANTMSSSFEALGMSLLYSSTMANPDQEKVDSAAESARMLVEAVKRDLKPRDIITKESIENAVSVIMATGGSTNAVLHYLAIAHAAEVDWTIDDFERIRKRVPVICDLKPSGQYVATDLHRAGGIPQVLKILLDAGLLHGDCMTITGRTIADELKDVPAVPRADQHVIFPIDRALYKEGHLAILKGNLAEDGAVAKITGLKNPVITGPARVFDDEQSAMDAILGDRIRAGDILVLRYLGPQGGPGMPEMLAPTSAIIGKGLGESVGFITDGRFSGGTWGMVVGHVAPEAFVGGTIALVQEGDSITIDAHRLLLQLNVDEAELARRRAAWRQPAPRYTRGVLAKFAALARPANQGAVTG

SEQ ID NO: 341 - DNA, 1686 bp, Burkholderia mallei
atggagttccccatgtcgtacaaccgccgctcgaagaacatcacgcaaggcgtggcccgttcgccgaaccgctcgatgtattacgcgctcggctatcagaaggaagatttcgacaagccgatgatcggcatcgcgaacggccactcgacgatcacgccgtgcaacgcgggcctgcagcgtctgtcggacgccgccgtcgcggccgtcaaggacgccggcgcgaatccgcagatcttcggcacgccgacgatctcggacggcatgtcgatgggcaccgaagggatgaagtactcgctcgtgtcgcgcgaggtgatcgccgattgcatcgagacctgcgtgcagggccaatggatggacggcgtcgtcgtcgtgggcggctgcgacaagaacatgccgggcggcatgatcgcgctcgcgcggatcaacgtgccgggcatctacgtgtacggcggcacgatccgccccggccactggaaaggccacgacctgacgatcgtgtcgtcgttcgaggcggtcggcgagttcaccgccggacgcatgtcgcaggaggatttcgaaggggtcgaaaagaacgcgtgcccgacgacgggctcgtgcggcggcatgtataccgcgaacacgatgagctcgtcgttcgaggcgctcggcatgtcgctgctgtactcgtcgacgatggccaatcccgatcaggagaaggtcgattcggcggcggaatcggcgcgcgtgctggtcgaggcggtgaagaaggacctgaagccgcgcgacatcatcacgaagcagtcgatcgagaacgcggtgtcggtcatcatggccacgggcggctcgaccaacgcggtgctccactatctggcgatcgcgcacgcggccgagatcgactggtcgatcgaggatttcgagcgcatcaggaagcgcgtgccggtgatttgcgacctgaagccgtcgggccagtacgtcgcgaccgatctgcacgcggcgggcggcattccgcaggtgatgaagctgctgctcgacgcgggcctgctgcacggcgactgcatgacgatcacgggccgcacgctcgccgaggagctgaaggacgtgccgagcgtgccgcgcgccgatcagaaggtgatccatccgatcgaccaggcgctgtacaaggaaggccacctcgcgatcctgaagggcaacctcgccgaggacggcgcggtcgcgaagatcaccggcctgaagaacccggtcatcaccggcccggcgcgcgtgttcgacgacgagcagagcgcgctcgccgcgatcctcgacgacaggatccgcgcgggcgacgtcgtcgtgctgcgctacctcggcccgcaaggcggcccggggatgcccgagatgctcgcgccgacatcggcgatcatcggcaagggcctcggcgaatcggtcggcctgatcaccgacggccgcttctccggcggcacgtgggggatggtggtcggccacgtcgcgccggaagcgttcgtcggcggcacgatcgcgctcgtgcaggaaggcgattcgatcacgatcgacgcgcacaagctgctgctgcaattgaacgtcgacgacgccgaactcgcgcgccgccgcgccgcatggaagcagccggcgccgcgctacacgcgcggcgtgctcgcgaagtacgcggcgctcgcccgcccggcgaaccagggcgccgtcacgggctga

SEQ ID NO: 342 - protein, 561 aa, Burkholderia mallei
MEFPMSYNRRSKNITQGVARSPNRSMYYALGYQKEDFDKPMIGIANGHSTITPCNAGLQRLSDAAVAAVKDAGANPQIFGTPTISDGMSMGTEGMKYSLVSREVIADCIETCVQGQWMDGVVVVGGCDKNMPGGMIALARINVPGIYVYGGTIRPGHWKGHDLTIVSSFEAVGEFTAGRMSQEDFEGVEKNACPTTGSCGGMYTANTMSSSFEALGMSLLYSSTMANPDQEKVDSAAESARVLVEAVKKDLKPRDIITKQSIENAVSVIMATGGSTNAVLHYLAIAHAAEIDWSIEDFERIRKRVPVICDLKPSGQYVATDLHAAGGIPQVMKLLLDAGLLHGDCMTITGRTLAEELKDVPSVPRADQKVIHPIDQALYKEGHLAILKGNLAEDGAVAKITGLKNPVITGPARVFDDEQSALAAILDDRIRAGDVVVLRYLGPQGGPGMPEMLAPTSAIIGKGLGESVGLITDGRFSGGTWGMVVGHVAPEAFVGGTIALVQEGDSITIDAHKLLLQLNVDDAELARRRAAWKQPAPRYTRGVLAKYAALARPANQGAVTG

SEQ ID NO: 343 - DNA, 1674 bp, Ralstonia eutropha
atggcattcaacaaacgctcccgcaacatcacgcaaggtgtggcgcgttccccgaaccgctcgatgtactacgccctgggctaccagaaggaagacttcgacaagcccatggtcggcatcgccaacggccactcgacgatcacgccgtgcaacgccggcctgcagcgcctggccgacgccgcgatcgacgccgtgaaggcctcggacgccaatccgcaggtattcggcacgccgacgatctccgacggcatgtcgatgggcaccgagggcatgaagtactcgctgatctcgcgcgaagtcattgccgactgcatcgagaccgccgcccagggccagtggatggacggcgtggtggtgatcggcggctgcgacaagaacatgccgggcggcatgatcgcgctcgcgcgcaccaatgtgccgggcatctacgtctatggcggcaccatcaagcccggcaactggaagggcaaggacctgaccatcgtgtcgtcgttcgaggccgtgggcgaattcaccgccggccgcatgagcgaagaagatttcgagggcgtggaaaggaacgcttgtccgtcgaccggatcgtgcggcggcatgtacaccgccaatacgatgagctcgtcgttcgaggcgcttgggatgtcgctgctgtattcgtcgacgatggccaaccccgatcaggaaaaggtcgatagcgctgccgaatcggcgcgcgtgctggtcgaggcgatcaagaaggacatcaagccgcgcgacatcatcacgcgcaagtcgatcgaaaacgccgtcgcgctgatcatggccaccggtggctcgaccaacgcggtgctgcactacctggccattgcgcactcggccgaagtcgaatggaccatcgacgatttcgagcgcatccgtcgcaaggtgcctgtgatctgcaacctgaagccgtcgggccagtacgtggccaccgacctgcacaaggcgggcggcatcccgcaggtcatgaagatcctgctgaaggccggactgctgcatggcgactgcctgaccatcacaggccgcacgctggctgaagagctggaacacgtgccggaccagccgcgggccgaccaggacgtgatcatgccaatcgagaaggcgctctatgcggaggggcatctggcgatcctgaagggcaatctcgccgaggaaggcgcggtggccaagatcaccggcctgaagaatccggtcatcaccgggccggcgcgggtgttcgaggatgaacagagcgcgatggaggcgatcctggccgacaagatcaatgcgggggatgtgctggtgctgcgctatcttgggcccaagggcgggcccgggatgccggaaatgctggcgcctacgtcagccattattggcaaggggttgggagagtcggtgggcttcatcaccgatggccggttctccgggggcacctgggggatggtcgtcggccatgtcgcgccggaagcgtatgtaggcggcaatattgcgctcgtgcgggaaggggattcgatcacgatcgatgcgcacaagctggtgttgcaggtgaatgtgtcggatgaggagttggctcgccgccgggctgagtggaaacaacctgttgcgcgttatacacggggggtattggccaagtttgctcgactggcgtcgacggccagtaagggggcggtgacggattga

SEQ ID NO: 344 - protein, 557 aa, Ralstonia eutropha
MAFNKRSRNITQGVARSPNRSMYYALGYQKEDFDKPMVGIANGHSTITPCNAGLQRLADAAIDAVKASDANPQVFGTPTISDGMSMGTEGMKYSLISREVIADCIETAAQGQWMDGVVVIGGCDKNMPGGMIALARTNVPGIYVYGGTIKPGNWKGKDLTIVSSFEAVGEFTAGRMSEEDFEGVERNACPSTGSCGGMYTANTMSSSFEALGMSLLYSSTMANPDQEKVDSAAESARVLVEAIKKDIKPRDIITRKSIENAVALIMATGGSTNAVLHYLAIAHSAEVEWTIDDFERIRRKVPVICNLKPSGQYVATDLHKAGGIPQVMKILLKAGLLHGDCLTITGRTLAEELEHVPDQPRADQDVIMPIEKALYAEGHLAILKGNLAEEGAVAKITGLKNPVITGPARVFEDEQSAMEAILADKINAGDVLVLRYLGPKGGPGMPEMLAPTSAIIGKGLGESVGFITDGRFSGGTWGMVVGHVAPEAYVGGNIALVREGDSITIDAHKLVLQVNVSDEELARRRAEWKQPVARYTRGVLAKFARLASTASKGAVTD

SEQ ID NO: 345 - DNA, 1674 bp, Ralstonia metallidurans
atggcttacaacaaacgttcccagcacatcacgcaaggcgtggcgcgctcccccaaccgttcgatgtactacgcgctcggctacaagaaggaagacttcgacaagccgatggtgggtatcgccaacggccactcgacgatcaccccctgcaacgccggcctgcagcgcctggcggacgcggccgtggatgcgatcaaggcctcggacgccaacccgcagatcttcggcacgccgacgatctccgacggcatgtcgatgggcaccgagggcatgaagtactcgctgatctcgcgtgaagtcattgccgactgcatcgaaaccgctgcccagggccagtggatggacggcgtggtcgtgatcggcggctgcgacaagaacatgcccggcggcatgatcgcactggcgcgcaccaacgtgccgggcatctacgtctacggcggcaccatccgcccgggtaactggaagggcaaggacctgaccatcgtgtcgtcgttcgaggccgtgggcgaattcaccgccggccgcatgagcgaggaagacttcgagggcgtggagaagaacgcctgcccgagcaccggctcgtgcggtggcatgtacaccgccaacacaatgagctcgtcgttcgaggcgctgggcatgtcgctgctgaattcgtcgacgatggccaacccggaccaggaaaaggtggacagcgccgccgaatcggcccgcgtgctggtggaagccatcaagaaggacatcaagccgcgcgacatcatcacgcgcaaatcgatcgagaacgccgtgacgctgatcatggccacgggcggttccaccaacgcggtactgcattacctggccatcgcccactcggccgaagtggaatggaccatcgacgatttcgagcgcatccgccgccgcgtgccggtgatctgcaacctgaagccgtcgggcgcctacgtggccaccgacctgcaccgcgccggtggcattccgcaagtgatgaagatcctgctgaacgccggtctgctgcatggcgactgcctgacgatcacgggccgcacgctggccgaggagctcgagcacgttcccaatgagccgcgtaccgaccaggacgtgatcctgccgatctcgcaggccctgtacaagcaaggccacctggccatcctgaagggcaacctcgccgaggaaggcgcagtggccaaaatcaccggcctgaagaacccggtcatcaccggcccggcccgcgtgttcgaggacgaacagagcgccatggaagcgatcctggcggacaagatcaacgctggcgacatcctggtgctgcgctaccttggcccgaagggcggcccgggcatgcctgaaatgctggcgccgacttcggcgatcatcggcaagggtctcggcgaatcggttggtttcatcaccgacggccgcttctcggggggcacctggggcatggtggttggccacgttgcgccggaagcccatgtgggcggtacgattgcactggttcaggaaggcgactcgatcacgatcgacgcgcaccagctgctgctgcaactgaatgtggccgacgacgagctggcccgccgccgcgctgcctggaaacagccggcgccgcgctacacgcgcggcgtactggcgaagttcgcgaggctggcctccacggccagcaagggcgccgtgacggactga

SEQ ID NO: 346 - protein, 557 aa, Ralstonia metallidurans
MAYNKRSQHITQGVARSPNRSMYYALGYKKEDFDKPMVGIANGHSTITPCNAGLQRLADAAVDAIKASDANPQIFGTPTISDGMSMGTEGMKYSLISREVIADCIETAAQGQWMDGVVVIGGCDKNMPGGMIALARTNVPGIYVYGGTIRPGNWKGKDLTIVSSFEAVGEFTAGRMSEEDFEGVEKNACPSTGSCGGMYTANTMSSSFEALGMSLLNSSTMANPDQEKVDSAAESARVLVEAIKKDIKPRDIITRKSIENAVTLIMATGGSTNAVLHYLAIAHSAEVEWTIDDFERIRRRVPVICNLKPSGAYVATDLHRAGGIPQVMKILLNAGLLHGDCLTITGRTLAEELEHVPNEPRTDQDVILPISQALYKQGHLAILKGNLAEEGAVAKITGLKNPVITGPARVFEDEQSAMEAILADKINAGDILVLRYLGPKGGPGMPEMLAPTSAIIGKGLGESVGFITDGRFSGGTWGMVVGHVAPEAHVGGTIALVQEGDSITIDAHQLLLQLNVADDELARRRAAWKQPAPRYTRGVLAKFARLASTASKGAVTD

SEQ ID NO: 347 - DNA, 1674 bp, Ralstonia solanacearum
atgccagacaacaagcgttcccagcacatcacccagggcgtggcacgctcgcccaaccgctcgatgtactacgcgctgggctaccagaaagaagacttcaacaatccgatgatcggcgtggccaacggccattcgaccatcacgccgtgcaactcgggcctgcagaaactggccgacgcggccgtggccgccgtcaaggcatcgaacgccaacccgcagatcttcggcacgcccaccatttccgacggcatgtcgatgggcaccgagggcatgaagtattcgctgatctcgcgcgaggtcatcgccgactgcatcgagacctgcgcacaaggccagtggatggacggcgtggtcgtgatcggcggctgcgacaagaacatgcccggcggcatgatcgcgctggcacgcaccaacgtgccgggcatctacgtgtacggcggcaccatccggccggggcactggaagggcaaggacctgaccatcgtgtcgtcgttcgaggccgtgggcgagttcaccgccggccgcatgagcgacgaagacttcgagggcatcgagaagaacgcctgcccgtcgagcggctcgtgcggcggcatgtacaccgccaacacgatgagctcgtcgttcgaggcgctgggcatgtcgctgctgtattcgtcgaccatggccaaccccgaccaggagaaggtcgacagcgccgccgaatcggcccgcgtgctggtcgaggccgtgcgccgcgacctcaagccgcgcgacatcatcacgcgcaagtcgatcgagaacgccgtggccgtcatcatggcgaccggcggctcgaccaacgccgtgctgcactacctggccatcgcccatgccgccggcgtggaatggaccatcgatgacttcgagcgcgtgcgccagcgcgtgcccgtgatctgcaacctgaagccgtcgggccagtatgtcgccaccgacctgcaccgcgcgggcggcatcccgcaggtgatgaagatcctgctgaacgcgggcctgctgcacggcgactgcatcaccatcaccggcaagacgctggccgaggaactcgccaacgtgcccgaccagccgcgcgcggaccaggacgtgatcctgccgctcgacaaggcgctctaccagcagggccacctcgccatcctcaagggcaacttggccgaggaaggcgccgtggcgaagatcaccggcctgaagaacccggtcatcaccggcccggcgcgcgtgttcgacgatgagcagagcgcgatggaagccatcctgggcgacaaaatcaacgccggcgacgtgctggtgctgcgctacctcggtccgaagggcggcccgggcatgccggaaatgctggccccgacgtcggccatcatcggcaagggcctgggcgaatcggtcggcttcatcaccgatggacgcttctcgggcggcacctggggcatggtggtcggccacgtcgcgccggaagccttcgtgggcggcaccatcgccctggtgcaggaaggcgattcgatcaccatcgacgcgcaccagcgcgtgctgcagctgaacgtgccggaagacgaactggcccgccgccgcgccgcgtggcagcagccggcaccgcgctatacgcgcggcgtgctcgccaagttcgctcagttggcgtcgacggccagcaagggcgccgtgaccggctga

SEQ ID NO: 348 - protein, 557 aa, Ralstonia solanacearum
MPDNKRSQHITQGVARSPNRSMYYALGYQKEDFNNPMIGVANGHSTITPCNSGLQKLADAAVAAVKASNANPQIFGTPTISDGMSMGTEGMKYSLISREVIADCIETCAQGQWMDGVVVIGGCDKNMPGGMIALARTNVPGIYVYGGTIRPGHWKGKDLTIVSSFEAVGEFTAGRMSDEDFEGIEKNACPSSGSCGGMYTANTMSSSFEALGMSLLYSSTMANPDQEKVDSAAESARVLVEAVRRDLKPRDIITRKSIENAVAVIMATGGSTNAVLHYLAIAHAAGVEWTIDDFERVRQRVPVICNLKPSGQYVATDLHRAGGIPQVMKILLNAGLLHGDCITITGKTLAEELANVPDQPRADQDVILPLDKALYQQGHLAILKGNLAEEGAVAKITGLKNPVITGPARVFDDEQSAMEAILGDKINAGDVLVLRYLGPKGGPGMPEMLAPTSAIIGKGLGESVGFITDGRFSGGTWGMVVGHVAPEAFVGGTIALVQEGDSITIDAHQRVLQLNVPEDELARRRAAWQQPAPRYTRGVLAKFAQLASTASKGAVTG

SEQ ID NO: 349 - DNA, 1674 bp, Ralstonia pickettii
atgccagacaacaagcgttcccagcacatcactcagggcgtggcgcgctcgcccaaccgctcgatgtactacgcgctgggctacacaaaagacgacttcaacaatccgatgatcggtgtggccaacggccattcgaccatcacgccatgcaactcgggcctgcagaagctggccgatgccgccgtggctgcaataaaggacgcccgcgcgaatccgcagatcttcggcacgcccaccatttccgatggcatgtcgatgggcacggaaggcatgaagttctcgctgatctcgcgcgaagtgattgccgactgcatcgagacctgcgtcaacggccaatggatggacggtgtggtcgtcatcggcggctgcgacaagaacatgccgggcggcatgatcgccctggcgcgcacgaatgtgccgggcatctacgtgtacggcggcaccatcaagccggggcactggaagggcaaggacctgaccatcgtctcgtcgttcgaggccgtgggcgaattcaccgccggccgcatgagcgaggaagacttcgagggcatcgaaaaaaacgcctgcccgtcgagcggttcgtgcggcggcatgtacacggccaacacgatgagttcgtcgtttgaagcgctaggcatgtcgttgctgtattcatcgacgatggccaatcccgatcaggagaaggtcgacagcgccgccgaatccgctcgcgtgttggttgatgccgtgcgccgcgacctgaagccgcgcgacatcatcacgcgcaagtccatcgagaacgctgtcgccgtcatcatggcaaccggtggctcgaccaacgccgtgctgcactacctggccatcgctcacgctgcggaagtggaatggacgatcgacgacttcgagcgggtgcgccagcgcgtgcccgtcatctgcaacctcaagccgtcgggccagtacgtggccaccgacctgcacgaggccggcggcatcccgcaggtgatgaagctgctgctcaacgccggcctgctgcatggcgattgcatcaccatcaccggcaagacgctggcggaagaactcgcccacgtgcccgaccagccgcgcgctgatcagaacgtgatcctgccgattgacaaggcgctctacaaggaaggccacctcgccatcctgaagggcaatctggccgaagaaggcgccgtggcgaagatcaccgggctgaagaatcccgtcatcaccggcccggcccgcgtgttcgaggacgagcaaagtgcgatgagcgcgatcctgggcgaccagatcaaggccggcgatattctggtgctgcgctatctggggccgaagggcggccccggcatgccggagatgctggccccgacctcggccatcatcggcaagggcctgggcgagtcagtcggcttcattaccgacggacgcttctcgggcggtacgtggggcatggtggtcggccacgtcgcaccggaagcctacgtgggaggcacgattggattggtgcacgaaggggattcgatcaccatcgacgcgcaccagcggctgctgcaattgaacgtgccggacgacgagcttgcccgccgccgcgccgcgtggaagcaacctgcgccgcgctatacgcgtggcgtgctggcgaagtttgcaaaactggcagcaacggccagcaagggtgcggtaacggactga

SEQ ID NO: 350 - protein, 557 aa, Ralstonia pickettii
MPDNKRSQHITQGVARSPNRSMYYALGYTKDDFNNPMIGVANGHSTITPCNSGLQKLADAAVAAIKDARANPQIFGTPTISDGMSMGTEGMKFSLISREVIADCIETCVNGQWMDGVVVIGGCDKNMPGGMIALARTNVPGIYVYGGTIKPGHWKGKDLTIVSSFEAVGEFTAGRMSEEDFEGIEKNACPSSGSCGGMYTANTMSSSFEALGMSLLYSSTMANPDQEKVDSAAESARVLVDAVRRDLKPRDIITRKSIENAVAVIMATGGSTNAVLHYLAIAHAAEVEWTIDDFERVRQRVPVICNLKPSGQYVATDLHEAGGIPQVMKLLLNAGLLHGDCITITGKTLAEELAHVPDQPRADQNVILPIDKALYKEGHLAILKGNLAEEGAVAKITGLKNPVITGPARVFEDEQSAMSAILGDQIKAGDILVLRYLGPKGGPGMPEMLAPTSAIIGKGLGESVGFITDGRFSGGTWGMVVGHVAPEAYVGGTIGLVHEGDSITIDAHQRLLQLNVPDDELARRRAAWKQPAPRYTRGVLAKFAKLAATASKGAVTD

SEQ ID NO: 351 - DNA, 1689 bp, Limnobacter sp.
atgagcatcaatcgacgttccaagaacattacccagggcgtggcccgttcgcccaaccgcgcgatgtatttcgccatgggttacaaagacgaagacttcaataaccccatgattggcattgccaatggccattccacgatcacgccttgcaacagcggcttgcagcctttggcagatgcggctgtgaaagcagtgaaagaggctggtggcaatccacaaattttcggcacccccaccatctccgatggcatgagcatgggcaccgaaggcatgaagtattcactggtcagccgcgaggtcatcgcggactgcatcgaaactgcggtacagggccagtggatggacggcgtgttggtgatcggcggctgcgacaagaacatgcccggcggcatgatcggcatggcccgcatgaacgtgccaggcatttacgtttatggcggcactatcaagccggggcgttacaaaggcaaagacctgaccattgtgtctgccttcgaagccgtgggcgaattcacggctggccgcatgagcgaggaagacttcaagggtatagagaagaacgcctgcccgagttccggttcctgtggtggcatgtacaccgccaacaccatgagctcggcattcgaagctttgggcatgagcctgccctactccagcaccatgtcgaacattgacgcagagaaagtcacttcaactgaagagtccgctcgcgtcttgatcgaagcggttcgcaacgacttgaagccccgcgacatcatcaccaagaagtcgattgaaaatgctgtggccgtgctgatggccaccggtggttccaccaacgcggtactgcacttcctggccattgcaaaagcagcagatgtggcctggagctacgaagactttgaacgcgtgcgcttgcgcacaccagtcatttgcaacctgaagccttctggccaatacgttgccactgacctgcacgatgccggtggtattccacaagtcatgaaaattttgttggatgcgggcctgttgcatggcgattgcatcaccatcactggcaaaaccattgcagaaaccctggccgatattccttcagtgccccgcgcggatcaaaacgtgatcatgccgatcgaaaaagccctgtacaagcaaggccacttggcgattctgaaaggcaacctggcacccgaaggtgctgtggccaagatcacaggcctcaaaaaccctgtaattaccggaccagccaaggtttttgacgacgagcaaagcgcgatggacgcaattttgggcgacaagatcaaagacggcgacgtgattattcttcgctacttgggccccaaaggcggtccaggcatgccggaaatgttggccccaacctcggcaattattggcaagggcttgggagaaacagtcggcctgatcaccgacggccgcttttccggtggcacctggggtatggtggtcggccacgttgcgccagaggcctacgttggcggcccgatcgcgctgatcaaggaaggtgactccatcacgatggacgcacatcagaaattgttacagatcaacgtgagcgaggaagaactggcgaagcgtcgtgaaagttgggtaaaacccaagccacgctacaccactggtgtgctggccaaattcgcagccttggccagtagcgccagcaagggtgcagtcaccgatggcgatctcgacctctaa

SEQ ID NO: 352 - protein, 562 aa, Limnobacter sp.
MSINRRSKNITQGVARSPNRAMYFAMGYKDEDFNNPMIGIANGHSTITPCNSGLQPLADAAVKAVKEAGGNPQIFGTPTISDGMSMGTEGMKYSLVSREVIADCIETAVQGQWMDGVLVIGGCDKNMPGGMIGMARMNVPGIYVYGGTIKPGRYKGKDLTIVSAFEAVGEFTAGRMSEEDFKGIEKNACPSSGSCGGMYTANTMSSAFEALGMSLPYSSTMSNIDAEKVTSTEESARVLIEAVRNDLKPRDIITKKSIENAVAVLMATGGSTNAVLHFLAIAKAADVAWSYEDFERVRLRTPVICNLKPSGQYVATDLHDAGGIPQVMKILLDAGLLHGDCITITGKTIAETLADIPSVPRADQNVIMPIEKALYKQGHLAILKGNLAPEGAVAKITGLKNPVITGPAKVFDDEQSAMDAILGDKIKDGDVIILRYLGPKGGPGMPEMLAPTSAIIGKGLGETVGLITDGRFSGGTWGMVVGHVAPEAYVGGPIALIKEGDSITMDAHQKLLQINVSEEELAKRRESWVKPKPRYTTGVLAKFAALASSASKGAVTDGDLDL

SEQ ID NO: 353 - DNA, 1674 bp, Herminiimonas arsenicoxydans
atggcattcaatcgccgctcgaaaaacatcacgcaaggcgtgtcccgcagtcctaaccgttccatgtattacgccatgggttacgaaaaggccgatttcgacaagcctatggtcggcatcgccaacggtcactcgacgattacgccatgtaactccggcctgcaaaaactggccgatatcgcgatcaagaccatcaaggatgcaggcggcaatccgcaagtgttcggtacgccgacgatttccgacggcatgtccatgggcaccgaaggcatgaagtattcgctgatttcgcgcgaagtcattgccgactgtatcgaaaccgcagtcaacggccaatggatggatggcgtgctggtcatcggcggctgcgacaagaatatgccgggcggcatgatcgccatgttgcgcaccaacgtgcctagtatttatgtctacggcggcaccatcaagccggggcactggaaaggcaaagacctgaccatcgtttccgcgtttgaagcggtcggcgaattcactgccggccgcatgtcacaagaagattttgacggcatcgaacgcaatgcctgcccatcatccggttcctgcggcggcatgtatacagccaataccatgtcgtcctcgttcgaggcgctgggcctggccttgccttactcgtcgacgatggccaatcctgacgatgaaaaagtcggctccgcagcggaatccgcgcgcgtgctgatcgaagcaatcaagaaggatctgaagccgcgcgacatcgtgacacgcaaggctatcgaaaacgcagtggccgtcatcatggcaaccggcggttcgaccaatgccgtgctgcacttcctggcgattgcgcacgctgcagaaatcgactggaccatcgacgacttcgaacgcatgcgcaaaaaagtccctgtcatctgcgatctgaaaccatccggcaaatacgtggcaaccgatctgcataaggccggcggcattccgcaagtgatgaaggtgttgctcgacgccggcttgttgcacggtgattgcatgacgatcaccggccagaccgttgcagaagcgctggcgcacatcccgtcggtaccaagtgccgaccaggacgtgatccacaccatcgacaaggctttgtacgcacaaggtcaccttgcaatcctgaagggcaatctgtcgcctgaaggttgcgtggcaaaaatcaccggtctgaaaaatcctgtcatcaccggacctgcacgcgtatttgacgacgaatactcggcaatggacgccatcatggcgaaccagatcaaggccggcgacgtactcgtcatgcgctacctcggacctaaaggcggcccgggcatgccggaaatgctggcaccgacttccgcactggtcggtcagggtctgggtgagtcagtcggcttgattaccgatggccgtttctccggcggtacctggggcatggtggttggccacgtttcgccggaagcgtttgtcggcggtaccatcggtctggtggaagaaggcgattccgtcaccatcgatgcgcgtcaattgctgattcagttgaacgtatcggaagaggaaatcgcacgccgtcgcgccaactggaagcagcctgcaccgcgttacacacgtggcgtgctggcaaaatatgcagctctggcatcgacggcaagcaaaggcgctgtcaccggctga

SEQ ID NO: 354 - protein, 557 aa, Herminiimonas arsenicoxydans
MAFNRRSKNITQGVSRSPNRSMYYAMGYEKADFDKPMVGIANGHSTITPCNSGLQKLADIAIKTIKDAGGNPQVFGTPTISDGMSMGTEGMKYSLISREVIADCIETAVNGQWMDGVLVIGGCDKNMPGGMIAMLRTNVPSIYVYGGTIKPGHWKGKDLTIVSAFEAVGEFTAGRMSQEDFDGIERNACPSSGSCGGMYTANTMSSSFEALGLALPYSSTMANPDDEKVGSAAESARVLIEAIKKDLKPRDIVTRKAIENAVAVIMATGGSTNAVLHFLAIAHAAEIDWTIDDFERMRKKVPVICDLKPSGKYVATDLHKAGGIPQVMKVLLDAGLLHGDCMTITGQTVAEALAHIPSVPSADQDVIHTIDKALYAQGHLAILKGNLSPEGCVAKITGLKNPVITGPARVFDDEYSAMDAIMANQIKAGDVLVMRYLGPKGGPGMPEMLAPTSALVGQGLGESVGLITDGRFSGGTWGMVVGHVSPEAFVGGTIGLVEEGDSVTIDARQLLIQLNVSEEEIARRRANWKQPAPRYTRGVLAKYAALASTASKGAVTG

SEQ ID NO: 355 - DNA, 1785 bp, Bordetella parapertussis
atgtccgataataaccggcgagcgtgttgttccgtagcgctgccttccgacagcgatctggccggcccggcatgggcctacgcacctggagacaagaccatgtccgacaacaatcgttcccgtcacattaccgagggcgtggcgcgcgcgcccaatcgggccatgtactacgcgctgggctacaccgaggcggatttccagaatccgatgatcggcgtggccaacggacattccacgatcactccatgcaacagcgggctgcagcgcctggccgacgcggcgatcgaggccatccgcgtctcccgcgccaacccccaggtgttcggcacgccgacgatttccgatggcatgtccatgggcaccgaaggaatgaagtattcgctggtgttgcgcgaggtcatcgccgactgcatcgagaccgccgcgcaggggcagtggatggatggcgtggtggtcatcggcggatgcgacaagaacatgcccggcggcatgatggcgctcgcgcgcatgaatgtgcccggcatctacgtgtatggcggcaccatcaagcccggccactacaagggcaaggacctgaccatcgtatcggtgttcgaagccgtcggcgaatacaccatgggccgcatggacgaaaccgacttcaaggccatcgagcaatgcgccatccccgggtcgggttcctgcggcggcatgtacacggccaacaccatgagctcggccttcgaggccatggggatgagcctgcctcattccagcaccatggccaacgaggaccaggagaaagtcgcgtcggcggcggaatcggcgcgcgtgctggtcgaggcggtgcggcgccagctgcggccgcgcgacatcatcacccgcgcttccatcgagaacgccgtggcggtgatcatggccacgggcggctcgaccaacgccgtgctgcacttcctcgccatcgcccacgcggcggaagtgccgtggaacatcgacgacttcgagcgcatccgcaagcgcgtgccggtcatctgcgatctcaagccgtccggcaagtacgtggcgaccgacctgcatcgcgccggcggcatcccacaagtgatgaagatcctgctgaacgccggcctgttgcatggcgattgcatcaccatcaccggcaagaccgtggccgagacgctggcgaacgtacccgatgcgccgccgcccgggcaggacgtcatcatgcccatcgaacgcgcgttctacccgcaggggcacctggcgatactcaagggcaatctttcgccggaaggctgcgtggccaagatcaccgggttgaagaatccggtcattaccggcccggcgcgcgtgttcgattccgaagacgatgccatgtccgccatcatggaccgccgcatccgcgatggcgatgtggtggtgatccgctacgagggccccaagggcggtccaggcatgcgcgagatgctcgcgcccacttccgcgctggtcggccaggggttgggcgaaaccgtcggcctgatcaccgacgggcggttttccggcggcacctggggcatggtggtcgggcacgtggcgcccgaggcgttcgtcggcgggccgatcgcgctgattcgcgagggcgattcggttaccatcgatgcccatcagctgctgctgcagctcaacatcagcgatgaggaaatggcggctcgtcgcaaggcttgggcccagcccaagccgcgctatgtgcgcggcgtgcttgccaagttcggcaagctggcctgtaccgccagccgtggggcagtaaccgatgcatttgaagagtag

SEQ ID NO: 356 - protein, 594 aa, Bordetella parapertussis
MSDNNRRACCSVALPSDSDLAGPAWAYAPGDKTMSDNNRSRHITEGVARAPNRAMYYALGYTEADFQNPMIGVANGHSTITPCNSGLQRLADAAIEAIRVSRANPQVFGTPTISDGMSMGTEGMKYSLVLREVIADCIETAAQGQWMDGVVVIGGCDKNMPGGMMALARMNVPGIYVYGGTIKPGHYKGKDLTIVSVFEAVGEYTMGRMDETDFKAIEQCAIPGSGSCGGMYTANTMSSAFEAMGMSLPHSSTMANEDQEKVASAAESARVLVEAVRRQLRPRDIITRASIENAVAVIMATGGSTNAVLHFLAIAHAAEVPWNIDDFERIRKRVPVICDLKPSGKYVATDLHRAGGIPQVMKILLNAGLLHGDCITITGKTVAETLANVPDAPPPGQDVIMPIERAFYPQGHLAILKGNLSPEGCVAKITGLKNPVITGPARVFDSEDDAMSAIMDRRIRDGDVVVIRYEGPKGGPGMREMLAPTSALVGQGLGETVGLITDGRFSGGTWGMVVGHVAPEAFVGGPIALIREGDSVTIDAHQLLLQLNISDEEMAARRKAWAQPKPRYVRGVLAKFGKLACTASRGAVTDAFEE

SEQ ID NO: 357 - DNA, 1686 bp, Bordetella petrii
atgcccagcaacgaacgttcacgccacatcacgcaaggcgtcgcccgcgcgcccaaccgggccatgtattacgcgctgggctaccaggaagccgatttcgacaaccccatgatcggcgtggccaacggccattccaccatcaccccctgcaacagcggcctgcagcggctggccgacgcggccatcgatgccgtgcgcgcggcccgcgccaatccgcaggtgttcggcacccccaccatatccgacggcatgtcgatgggcaccgagggcatgaaatactcgctggtgtcgcgcgaagtcattgccgactgtatcgagaccgccgtgcagggccagtggatggacggcgtcgtggtcatcggcggctgcgacaagaacatgcccggcggcatgatcgcgctggcccgcatgaacgtgccaggcatctacgtgtatggcggcaccatcaagccgggccgctataaagggcaagatctcactatcgtgtccgtgttcgaagccgtcggtgagtacaccatggggcgcatggacggcgaagatttccgccagatcgaaaaatgcgccattcccggctcgggctcgtgcggcggcatgtacaccgccaacaccatgagttcggccttcgaagccatgggcatgagcctgccgtattccagcaccatggccaacgaagacgacgaaaaaatcgcctcggccgccgagtccgcccgcgtgctggtcgatgccgtgcggcgcgacgtgcggccgcgcgacatcatcacgcgcgaatccatcgaaaacgccgtgtcggtcatcatggccacgggcggctccaccaatgccgtgctccatttcctggccatcgcccacgccgccgaagttcaatggaccatcgacgacttcgagcgcatccgccggcgcgtgccggtcatctgcgacctcaaaccttcgggccgatacgtggccaccgatctgcaccgcgccggcggcgtcccgcaagtcatgaagctgctgctcgctgccggcttgctgcatgggcattgcatgaccatcaccggcaagaccatcgccgaaacgctcgccgacgtgcccgccgagccgccggccggccaggatgtcatccggcctatcggccgcgcgctgtacccgcagggccatctggccatcctcaagggcaacctgtcgcccgagggctgcgtggccaagatcacgggcctgaagaatcccgtcatcaccggcccggcgcgcgtgttcgattcagaagacgacgccatggccgccatcatggaacggcgcattcgcgctggcgacgtggtggtcatccgctacgaagggcccaagggcggtcccggcatgcgcgaaatgctggcgcccacctcggcgctggtggggcagggcctgggcgaaagcgtcggcctcattaccgatggccgcttctcgggcggcacctggggcatggtcgtgggccatgtcgcgcccgaggcctatgtgggcggccccattgccctgatccgcgaaggcgattcggttaccatcgacgctcaccaattgttgttgcagctcaatatttctgacgacgaaatggcggcgcgccgcaaggcctgggtccagccccggccgcggtacacgcgcggcgtgcttgccaagttcggcaagctggccggcaccgccagtcgcggggcagttaccgatgcatttgaagcatag

SEQ ID NO: 358 - protein, 561 aa, Bordetella petrii
MPSNERSRHITQGVARAPNRAMYYALGYQEADFDNPMIGVANGHSTITPCNSGLQRLADAAIDAVRAARANPQVFGTPTISDGMSMGTEGMKYSLVSREVIADCIETAVQGQWMDGVVVIGGCDKNMPGGMIALARMNVPGIYVYGGTIKPGRYKGQDLTIVSVFEAVGEYTMGRMDGEDFRQIEKCAIPGSGSCGGMYTANTMSSAFEAMGMSLPYSSTMANEDDEKIASAAESARVLVDAVRRDVRPRDIITRESIENAVSVIMATGGSTNAVLHFLAIAHAAEVQWTIDDFERIRRRVPVICDLKPSGRYVATDLHRAGGVPQVMKLLLAAGLLHGHCMTITGKTIAETLADVPAEPPAGQDVIRPIGRALYPQGHLAILKGNLSPEGCVAKITGLKNPVITGPARVFDSEDDAMAAIMERRIRAGDVVVIRYEGPKGGPGMREMLAPTSALVGQGLGESVGLITDGRFSGGTWGMVVGHVAPEAYVGGPIALIREGDSVTIDAHQLLLQLNISDDEMAARRKAWVQPRPRYTRGVLAKFGKLAGTASRGAVTDAFEA

SEQ ID NO: 359 - DNA, 1695 bp, Polaromonas sp.
atggaaaccaagaccattcagctcaacccccgcagcaaaaacatcaccgaaggcaaatcgcgcgcgcccaaccgctcgatgtactacgccatgggctatgaagaggccgacttcaagaagcccatgattggtgtggccaacgggcacagcaccatcaccccctgcaacagcggcctgcaaaagctggcggacgcggccattgccggcattgaagaagccggcggcaacgcccaggtgttcggcacgcccaccatctcggacggcatggccatgggcaccgagggcatgaagtactcgctggtcagccgcgaagtgatctccgactgcatcgaaacctgcgtgcagggccagtggatggacggcgtgctggtgatcggcggctgcgacaagaacatgcccggcggcctgatgggcatgctgcgcgccaacgtgccggccatctacgtctatggcggtaccattttgccgggcagctacaagggcaaagacctcaacatcgtcagcgtgtttgaagccgtcggcgaaaacgcagcaggccgcatgagcgatgaagacctgctgcaaatcgagcgccgcgccattcccggcaccggtagctgcggcggcatgtacacggccaacaccatgtccagcgccttcgaggcgctcggcatttcgctgccctactccagcaccatggccaatccgcacgacgagaaaatgaactcggccagggagtccgccaaggtcctggtcgaagccatcaagaaagacatcaagccgcgcgatctcgtcacgaagaaagccattgaaaacgccgtggcagtgatcatggccacgggcggctccaccaatgccgtgctgcacttcctggcgattgcgcatgccgccggcgtggactggacaatcgacgacttcgaacgcgtgcgccaaagaacgccggtgctgtgcgacctgaagccgtccggcaagtacctggccgtggacctgcaccgcgccggcggcattccgcaggtcatgaagatgctgctggcggccggcctgctgcatggcgactgcctgacgatcaccggccaaaccattgccgaggtgctgaaggatgtgcccgaagcgccgcgcgccgaccaggacgtgattcgccccatcagcaaccccatgtacgcccagggccacctggccatcctgaagggcaacctctcgcctgaaggctgcgtggccaaaatcaccggcctgaaaaacccggtcatgacgggcccggcccgcgtatttgacgacgagcagtcggcgctggccgccatcctggccggcaagatcaaggcgggcgacgtgatggtgctgcgttacctcggccccaagggcggtcccggcatgcctgaaatgctggcgcctaccggtgcgctgattggcgccggcctgggcgaaagcgtgggcctgatcaccgacggccgcttctccggcggcacctggggcatggtagtcggccatgtggcccccgaagcggccgccggcggcaatatcgcattcatcaacgaaggcgactccatcaccattgactcaaaacagttgctgctgcaactgaacatcagcgacgcggagctggaaaaacgcaaggtcggctggaaagcaccggcaccgcgctacaaccgcggcgtgcaggccaagtttgccttcaacgcgtcgagtgccagcaagggtgcggtgctggacgactattga

SEQ ID NO: 360 - protein, 564 aa, Polaromonas sp.
METKTIQLNPRSKNITEGKSRAPNRSMYYAMGYEEADFKKPMIGVANGHSTITPCNSGLQKLADAAIAGIEEAGGNAQVFGTPTISDGMAMGTEGMKYSLVSREVISDCIETCVQGQWMDGVLVIGGCDKNMPGGLMGMLRANVPAIYVYGGTILPGSYKGKDLNIVSVFEAVGENAAGRMSDEDLLQIERRAIPGTGSCGGMYTANTMSSAFEALGISLPYSSTMANPHDEKMNSARESAKVLVEAIKKDIKPRDLVTKKAIENAVAVIMATGGSTNAVLHFLAIAHAAGVDWTIDDFERVRQRTPVLCDLKPSGKYLAVDLHRAGGIPQVMKMLLAAGLLHGDCLTITGQTIAEVLKDVPEAPRADQDVIRPISNPMYAQGHLAILKGNLSPEGCVAKITGLKNPVMTGPARVFDDEQSALAAILAGKIKAGDVMVLRYLGPKGGPGMPEMLAPTGALIGAGLGESVGLITDGRFSGGTWGMVVGHVAPEAAAGGNIAFINEGDSITIDSKQLLLQLNISDAELEKRKVGWKAPAPRYNRGVQAKFAFNASSASKGAVLDDY

SEQ ID NO: 361 - DNA, 1695 bp, Polaromonas naphthalenivorans
atggaaaccaaagtcatcgccatcaaccgccgctcggccaacatcaccgagggcaagtcgcgcgcgcccaaccgctccatgtactacgccatgggctacgaggaaagcgatttcaagaaacccatgatcggcgtggccaacggccacagcaccatcacgccgtgcaacagcggcctgcaaaagctggcggacgcggcgattgacgcgattgaggaagccggcggcaatgcgcaggtgttcggcacgccgacgatttcggacggcatggccatgggcaccgaaggcatgaagtattcgctggtcagccgcgaagtcatttcggactgcatcgaaacctgcgtgcagggccagtggatggacggcgtgctggtggtcggcggctgcgacaagaacatgcccggcggcctgatgggcatgctgcgcgccaacgtgccggcgatttttgtctatggcggcacgatcttgccaggccattaccagggcaaagacctgaacatcgtcagcgtgttcgaagccgtcggtgaaaacgccgccggccgcatgagcgacgaagacctgctgcagattgagcgtcgcgccattcccggcaccggcagctgcggcggcatgtacaccgccaacaccatgtccagcgccttcgaggccctgggcatttcgctgccctactccagcaccatggccaatccgcatgacgaaaagctgaactcggcgaaggaatcggcccgggtgctgatcgaagcggtcaagaaagacatcaagccgcgcgacatcgtcaccaagaaatccattgaaaacgccgtggccgtcatcatggccaccggcggctcgaccaatgccgtgctgcatttcctggccatcgcccatgcggccggcgtcgaatggacgattgacgacttcgagcgcgtgcgccagaaaaccccggtgctgtgcaacctgaaaccctcgggccagtacctggcggtggacctgcaccaggccggcggcattccgcaggtcatgaaaatgctgctggtcgccggcctgctgcatggcgactgcatcaccatttcgggccagaccattgccgaagtgcttgcggacgtgcccgatgcgccgcgcgccggccaggacgtgatccgccccatcgaccagccgatgtatgcgcagggccacctggccatcctcaagggcaacctctcgcccgaaggctgcgtggccaagatcaccggcttgaagaacccggtcatgaccggcccggcccgggtgtttgaggacgagcagtccggcctgaaggcgattctggacggcaagatcgtggccggtgacgtgatggtgctgcgctacctcggccccaagggcggtcccggcatgcctgaaatgctggccccgaccggcgcgctgattggcgccggcctgggcgagagcgtcggcctgatcaccgacgggcgcttttccggcggcacctggggcatggtggtcggccatgtggcgccggaagcggcggccggcggcaatatcgccttcatcgaggaaggcgactcgatcacgattgacgccaatcagctgctgctgcaactgaacatcagcgacgccgagcttgaaagccgcaaggtcggctggacggccccggccccgcgttacacccgtggcgtgcaggccaagttcgccttcaatgcctccagcgccagcaagggcgcggtgcttgatgactattga

SEQ ID NO: 362 - protein, 564 aa, Polaromonas naphthalenivorans
METKVIAINRRSANITEGKSRAPNRSMYYAMGYEESDFKKPMIGVANGHSTITPCNSGLQKLADAAIDAIEEAGGNAQVFGTPTISDGMAMGTEGMKYSLVSREVISDCIETCVQGQWMDGVLVVGGCDKNMPGGLMGMLRANVPAIFVYGGTILPGHYQGKDLNIVSVFEAVGENAAGRMSDEDLLQIERRAIPGTGSCGGMYTANTMSSAFEALGISLPYSSTMANPHDEKLNSAKESARVLIEAVKKDIKPRDIVTKKSIENAVAVIMATGGSTNAVLHFLAIAHAAGVEWTIDDFERVRQKTPVLCNLKPSGQYLAVDLHQAGGIPQVMKMLLVAGLLHGDCITISGQTIAEVLADVPDAPRAGQDVIRPIDQPMYAQGHLAILKGNLSPEGCVAKITGLKNPVMTGPARVFEDEQSGLKAILDGKIVAGDVMVLRYLGPKGGPGMPEMLAPTGALIGAGLGESVGLITDGRFSGGTWGMVVGHVAPEAAAGGNIAFIEEGDSITIDANQLLLQLNISDAELESRKVGWTAPAPRYTRGVQAKFAFNASSASKGAVLDDY

SEQ ID NO: 363 - DNA, 1695 bp, Rhodoferax ferrireducens
atggacatcaaaccagtcatcctgaacccacgcagcaaaaacatcaccgagggcaaatcgcgggcgcccaatcgctccatgtactacgccatgggctacgaggccgacgacttcaagaagcccatgatcggtgtcgccaacggccacagcaccatcacaccgtgcaactccggcctgcaaaagctggccgatgccgccattgccgcgattgaagaagccggcggcaacgcccaggtgttcggcacccccaccatttccgacggcatgtcgatgggcaccgagggcatgaagtattcgctggtcagccgcgaagtaatttccgactgtattgagacctgcgtgcagggccagtggatggacggtgtgctggtgatcggcggttgcgacaaaaacatgcccggcggcctgatgggcatgctgcgcgccaatgtgcccgcgatttatgtctacggcggcaccattttgccgggccattacaagggccaggacctcaacatcgtgagcgtgttcgaggccgtgggcgagaacgccgcaggtcgcatgagcgacgaagatctgttggagattgagcgccgcgccatccctggccccggctcttgcggcggcatgtacaccgccaacaccatgagttcggcctttgaggcactgggcatctccctggtctactcgtccaccatggccaatccgcatgacgagaagctgaattcggcccaagaatcagccaaggtgctgattgaagccatcaagaacgacctgaagccgcgtgacatcgtgacccgcaaatcgattgagaacgcgattgccgttgtgatggcgattggcggctcgaccaacgcggtgctgcatttcctggcgattgcccatgccgcaggcgtggagtggacgattgacgactttgagcgtgtacgccaaaaaaccccggtgttgtgcgacctcaaaccgagcggcaagtacctggcggtggacctgcaccgcgccggtggcattccgcaagtgatgaagatgctgctaagcgctggcctgctgcacggcgactgcatcaccatcaccggccagaccgtggctgaagtgttgaaagacgtgccggatgcaccacgggcagaccaaaacgtgattcggccgatgaacaaaccgatgtatgcccagggccatctggccattctgaagggcaacctggccccggaaggctgcgtcgccaagatcaccggcctgaaaaacccggtcatgaccggcccggcacgcgtctttgaggacgaacaatcggccttggccgcgattctggccaacaagattgtggccggcgatgtcatggtgctgcgctacctcggccccaaaggcggccccggcatgcccgaaatgctggccccgaccggcgcgctggtcggccagggtttgggcgaatcagtcggcctgatcaccgacggccgtttctccggtggcacctggggcatggtggtcggtcacgtggcaccggaagcggctgccggcggcctgattgctttgattgaagaaggcgactcgatcaccatcgacgcgcaccagttgctgctgcaactcaacgtcagcgacgacatcattgccaaacgccgtagcgtgtggacggccccgcagccgcgctacacacgcggcgtgcaggccaagtttgcctttaacgcatccaccgccagcaagggtgcggtgctggacaactactga

SEQ ID NO: 364 - protein, 564 aa, Rhodoferax ferrireducens
MDIKPVILNPRSKNITEGKSRAPNRSMYYAMGYEADDFKKPMIGVANGHSTITPCNSGLQKLADAAIAAIEEAGGNAQVFGTPTISDGMSMGTEGMKYSLVSREVISDCIETCVQGQWMDGVLVIGGCDKNMPGGLMGMLRANVPAIYVYGGTILPGHYKGQDLNIVSVFEAVGENAAGRMSDEDLLEIERRAIPGPGSCGGMYTANTMSSAFEALGISLVYSSTMANPHDEKLNSAQESAKVLIEAIKNDLKPRDIVTRKSIENAIAVVMAIGGSTNAVLHFLAIAHAAGVEWTIDDFERVRQKTPVLCDLKPSGKYLAVDLHRAGGIPQVMKMLLSAGLLHGDCITITGQTVAEVLKDVPDAPRADQNVIRPMNKPMYAQGHLAILKGNLAPEGCVAKITGLKNPVMTGPARVFEDEQSALAAILANKIVAGDVMVLRYLGPKGGPGMPEMLAPTGALVGQGLGESVGLITDGRFSGGTWGMVVGHVAPEAAAGGLIALIEEGDSITIDAHQLLLQLNVSDDIIAKRRSVWTAPQPRYTRGVQAKFAFNASTASKGAVLDNY

SEQ ID NO: 365 - DNA, 1707 bp, Verminephrobacter eiseniae
atggcagacaacaagacgaccacgatcgagcctatcaaccgccgcagcgcgaacatcacacagggcaagtcgcgcgcacccaaccgctccatgtactacgccatgggctacgtggagggcgacttcgtcaagccgatggtcggcgtggccaatggccacagcaccatcacgccttgcaacagcgggctgcaaaaactgaccgatgccgccatcgagggcatcgaggaggccggcggcaatgcccaggtgttcggcacgccgaccatctcggacggcatggccatgggcaccgaaggcatgaagtacagcctggtcagccgtgaagtcatcagcgactgcatagaaacctgcgtcagcggccagtggctggacggcgtgctggtggtcggcggctgcgacaaaaacatgcccggcggcctgatgggcatgttgcgcgccaacgtgcccgcaatctatgtgtacggcggcaccatcctgcccggccactaccaggggcgggaactgaatatcgtcagcgtgttcgaggcggtgggcgaaaacgccgccggcaagctgagcgaccacgacctcagggagatcgaaaagcgcgccatccccggcaccggctcctgcggcggcatgtataccgccaacaccatgtccagcgcgttcgaggccctgggcatcagcctgccctactcgtcgaccatggccaacccgcatgacgagaagacgaactcggccaaggcatcggccaaggtgctgatcgaggccatccgcaacgacctcaagccgcgcgacatcgtgaccaggaaggccatcgagaatgcagtggccgtgatcatggccaccggcggctcgaccaacgccgtgctgcatttcctggcgatcgcccatgcggcaggcgtgccgtggagcatcgacgacttcgagcgcgtgcgccagaagacccccgtgctgtgcgacctcaagcccagcggcaaatacctggccgtggacctgcaccgcgcgggcggcatcccgcaggtgatgaagctgctgctcaacgccggcctgctgcatggcgactgcatcaccatcgagggcaagacgatggcccaagtgctcaaggatgtgcccgatcggccgcgcgcagaccagaacgtgatccgccccatcgaccagcccctgtacgcgcagggccacctggccatcctcaagggcaacctcagccccgaaggggccgtggccaagatcaccggcctgaagaacccggtcatcaccggcccggcgcgcgtgttcgacgacgagcaatctgcgctgcaggcgatactggacggcaagatccaggccggcgacgtgatggtgctgcgctacctggggcccaagggcggccccggcatgcctgaaatgctggcccccaccggcgcgctgatcggcgccggcctgggagaaagcgtgggcctgatcaccgacgggcgcttttccggcggcacctggggcatggtcgtcggccatgtggcgcccgaggccgccgcaggcggcaccatcgctttcgtgcatgaaggcgacagcatcaccatcgacgcccgccaactgctgctgcaattgaatgtggctgaggcagaaatcgcccggcgccgtgcccggtggacggcccccgctgcgcgctacacacgcggcgtgcaggccaagttcgccttcaacgcatcgagcgccagccaaggcgcggtgctcgacgcatactga

SEQ ID NO: 366 - protein, 568 aa, Verminephrobacter eiseniae
MADNKTTTIEPINRRSANITQGKSRAPNRSMYYAMGYVEGDFVKPMVGVANGHSTITPCNSGLQKLTDAAIEGIEEAGGNAQVFGTPTISDGMAMGTEGMKYSLVSREVISDCIETCVSGQWLDGVLVVGGCDKNMPGGLMGMLRANVPAIYVYGGTILPGHYQGRELNIVSVFEAVGENAAGKLSDHDLREIEKRAIPGTGSCGGMYTANTMSSAFEALGISLPYSSTMANPHDEKTNSAKASAKVLIEAIRNDLKPRDIVTRKAIENAVAVIMATGGSTNAVLHFLAIAHAAGVPWSIDDFERVRQKTPVLCDLKPSGKYLAVDLHRAGGIPQVMKLLLNAGLLHGDCITIEGKTMAQVLKDVPDRPRADQNVIRPIDQPLYAQGHLAILKGNLSPEGAVAKITGLKNPVITGPARVFDDEQSALQAILDGKIQAGDVMVLRYLGPKGGPGMPEMLAPTGALIGAGLGESVGLITDGRFSGGTWGMVVGHVAPEAAAGGTIAFVHEGDSITIDARQLLLQLNVAEAEIARRRARWTAPAARYTRGVQAKFAFNASSASQGAVLDAY

SEQ ID NO: 367 - DNA, 1695 bp, Acidovorax sp.
atgaccgacccgctgccgctgaaccgccgctccgcccacatcacccagggcaaggcgcgcgcgcccaaccgctccatgttctacggcatgggctaccaagagggtgacttcgccaagcccatggtgggcgtggccaacgggcacagcaccatcacgccctgcaacagcggcctgcaacgcctggccgacgcggccatcgcaggcatcgaggaagcgggcggcaacgcccaggtcttcggcacgcccaccatcagcgacggcatggccatgggtaccgagggcatgaagtacagcctggtgagccgcgaggtgattgccgactgcgtcgagacctgcgtgcagggccagtggatggacggcgtggtcgtcatcggcggctgcgacaagaacatgcccggcggcctgatgggcatgctgcgcgccaacgtgccggccatctacgtgtatggcggcaccatcctgccgggccgctggcaggggcaagacctgaacatcgtgagcgtgttcgaagccgtgggccagaacgccgcgggcaggatgaccgaccaggagctgaaggacatcgagcagcacgccatcccgggcacgggctcgtgcggcggcatgtacacggccaacaccatgtcctcggccttcgaggcgctgggcatgagcctgccctactcctccaccatggccaatccgcacgacgagaaaatgaactcggcccgcgaatccgcccgggtgctgatcgaggccatccgcaaggacttgaagccacgcgacatcgtcacgcgcaaggccatcgagaacgccgtggccgtgatcatggccacgggcggctccaccaacgcggtgctgcacttcctggcgatcgcgcacgcggcgggtgtggagtggtccatcgacgacttcgagcgcatgcgcaagaaggtcccagtgatctgcgacctcaagcccagcggccggtacctggccgtcgacctgcaccgcgcgggcggcattccccaggtgatgaaggtgctgctgaacgccggcctgttgcacggcgactgcatgaccatcaccggtaaaaccatcgccgaaaccctggccgacgtacccgacgcgccacggccggaccaggacgtgattcgcccgatcgacaaggcgctgtaccgcgaggggcacctcgccatcctcaagggcaacctgagtcccgagggcgccgtggccaagatcaccgggctgaagaaccccgtcatcaccgggcccgcgcgtgtgttcgacgacgagcagtcggcgctgcaggccatcctggacggcaggatcgtcgcgggcgacgtgatggtgttgcgctacctcggccccaagggtggcccgggcatgccggagatgctggcccccacgggcgcgctgatcggtgcgggcctgggcgagagcgtgggcctgatcaccgacgggcgcttctcgggcggcacctggggcatggtggtgggccacgtcgcgcccgaggccgctgcggggggcactattgcgctggtgcatgagggcgacacgatcaccatcgacgcccaccaactgctgctgcaactgcacgtggacgacgccacgctggcacagcgccgcgccgcctggcagccacccacgccgcgctacatgcggggcgtgcaggccaagtttgccttcaacgcctccagcgccagcaagggtgcggtgctggatgacttttcatga

SEQ ID NO: 368 - protein, 564 aa, Acidovorax sp.
MTDPLPLNRRSAHITQGKARAPNRSMFYGMGYQEGDFAKPMVGVANGHSTITPCNSGLQRLADAAIAGIEEAGGNAQVFGTPTISDGMAMGTEGMKYSLVSREVIADCVETCVQGQWMDGVVVIGGCDKNMPGGLMGMLRANVPAIYVYGGTILPGRWQGQDLNIVSVFEAVGQNAAGRMTDQELKDIEQHAIPGTGSCGGMYTANTMSSAFEALGMSLPYSSTMANPHDEKMNSARESARVLIEAIRKDLKPRDIVTRKAIENAVAVIMATGGSTNAVLHFLAIAHAAGVEWSIDDFERMRKKVPVICDLKPSGRYLAVDLHRAGGIPQVMKVLLNAGLLHGDCMTITGKTIAETLADVPDAPRPDQDVIRPIDKALYREGHLAILKGNLSPEGAVAKITGLKNPVITGPARVFDDEQSALQAILDGRIVAGDVMVLRYLGPKGGPGMPEMLAPTGALIGAGLGESVGLITDGRFSGGTWGMVVGHVAPEAAAGGTIALVHEGDTITIDAHQLLLQLHVDDATLAQRRAAWQPPTPRYMRGVQAKFAFNASSASKGAVLDDFS

SEQ ID NO: 369 - DNA, 1695 bp, Delftia acidovorans
atgaccccgccgaaccagatcaaccgccgaagctcccacatcaccgaaggcaaggcgcgcgcagccaaccgctccatgttctacggcatgggctacaaggaagaggatttcaagaagcccatggtcggcgtggccaacggccacagcacgatcacgccgtgcaactccggcctgcaaaggctggcggacgcggccatcgcaggcatcgaggaagccggcggcaacgcgcaggtgttcggcacgccgaccatctcggacggcatgtccatgggcacggaaggcatgaagtactcgctggtcagccgcgaggtgatcgccgactgcatagagacctgcgtgggcggccagtggatggacggcgtgctagtggtcggcggctgcgacaagaacatgccgggcggcatgatgggcatgctgcgcgccaatgtgccggccatctacgtctacggcggcaccatcctgcccggcaggtggaaaggccgggacctgaacatcgtcagcgtgttcgaggccgtcggcgaaaacgccgcgggaaagatcagcgaccaggagctcaaggacatcgagcagcacgccattcccggcacgggctcgtgcggcggcatgtacaccgccaacaccatgtcgagcgcgttcgaggcgctgggcatgagcctgccctactcctccaccatggccaatccccatgatgaaaaggaaaactcggccaaggaatccgccagggtgctgatcgaggccatcaagatggacctcaagccgcgcgatatcgtgacgcgcaagtccatcgagaacgcggtctcggtgatcatggcgaccgggggctccaccaatgccgtgctgcactttcttgcgatcgcccatgcggccggcgtgccctggtccatcgacgacttcgagcgcatccgccagcgggtgccggtgctgtgcgatctcaagcccagcggcagatacctggcggtggacctgcaccaggcgggcggcatcccgcaggtcatgaagatcctgctgaatgcgggcctgctgcacggcgactgcatcaccatctcgggccagaccattgcgcagaccctggctggcgtgcctgacgaaccaccgaacccgcagatcatccgccccctctcggatgcactctatccgcagggccacctggccattctcaagggcaacctgagcccggaaggcgcggtggccaagatcacgggcctgaagaacccggtcatcaccggcccggcacgcgtgttcgacgatgagcaatcggcactggcggccatcctcgacggcaggatacaggccggcgatgtgatggtgctgcgctacctgggccccaagggcggccccggcatgccggaaatgctggcccccacgggcgccctgatcggcgccggcctgggcgagagcgtgggcctgatcaccgatggccgcttctccggcggcacctggggcatggtggtcggccacgtggcgccggaagcggccgtgggcggcaccatcgcgctggtgcacgagggcgactcgatcaccatcgacgcgcacgcattgcggctgcagctgaacgtgcccgaagacgtgctcgcccagcgccgcgcggcatggaaggcccccgcgccccgctacacgcggggcgtgcaggccaagttcgctttcaacgcatcgagcgccagctcgggcgcggtgctggacaacttcgccatctga

SEQ ID NO: 370 - protein, 564 aa, Delftia acidovorans
MTPPNQINRRSSHITEGKARAANRSMFYGMGYKEEDFKKPMVGVANGHSTITPCNSGLQRLADAAIAGIEEAGGNAQVFGTPTISDGMSMGTEGMKYSLVSREVIADCIETCVGGQWMDGVLVVGGCDKNMPGGMMGMLRANVPAIYVYGGTILPGRWKGRDLNIVSVFEAVGENAAGKISDQELKDIEQHAIPGTGSCGGMYTANTMSSAFEALGMSLPYSSTMANPHDEKENSAKESARVLIEAIKMDLKPRDIVTRKSIENAVSVIMATGGSTNAVLHFLAIAHAAGVPWSIDDFERIRQRVPVLCDLKPSGRYLAVDLHQAGGIPQVMKILLNAGLLHGDCITISGQTIAQTLAGVPDEPPNPQIIRPLSDALYPQGHLAILKGNLSPEGAVAKITGLKNPVITGPARVFDDEQSALAAILDGRIQAGDVMVLRYLGPKGGPGMPEMLAPTGALIGAGLGESVGLITDGRFSGGTWGMVVGHVAPEAAVGGTIALVHEGDSITIDAHALRLQLNVPEDVLAQRRAAWKAPAPRYTRGVQAKFAFNASSASSGAVLDNFAI

SEQ ID NO: 371 - DNA, 1683 bp, Methylibium petroleiphilum
atgagcatcaaccgccgttcgaagaacatcaccgaaggcgtggcccgcgcacccaaccgctcgatgtactacgcgatgggctaccaggaggccgacttcaagaagccgatgatcggcgtggcgaacggccactcgaccatcacgccctgcaactcgggcctgcagaagctggccgacgccgcggtcgagggcatcgaggcggccggcggcaatgcacagatcttcggcacccccaccatcagcgacggcatggcgatgggcaccgagggcatgaagtactcgctggtctcgcgcgaggtcatcgccgactgcgtggaaacctgcgtcggcggccagtggatggacggcgtgctggtggtcggcggctgcgacaagaacatgccgggcggcatgatgggcatgctgcgcgccaacgtgcccgcgatctacgtctacggcggcaccatcctgccgggaaagtacaagggccaggatctcaacatcgtcagcgtgttcgaggccgtcggccagttcaccgcgggcaacatgagcgaggaagacttctgccagatcgagcgacgcgcgatcccgggcagtggctcctgcgggggcatgtacaccgccaacaccatgagttcggccttcgaggccctgggcatgagcctgccgttcgcctccacgatggccaatgtcgaggacccgatcgtcgcgcacaccaaggaagcggcgcgcgtgctggtcgaggcagtgaaggccgacctcaagccgcgtgacatcgtcacacgcaagagcatcgagaacgcggtcgcggtgatcatggccaccggcggctcgaccaatgcggtgctgcacttcctggccatcgcgcacgccgccggcgtcgagtggacgatcgacgacttcgagcgcgtgcgccgcaaggtgccggtgctgtgcgacctcaaacccagcggcaggtacctggcgatcgacctgcaccgcgccggcggcatcccgcaggtgatgaagacgctgctcgccgccgggctgatccacggcgactgcatcaccatcaccggaaggaccgtggccgagaacctggccgacatccccgatgcgccgcgcgccgaccaggacgtgatccgcccgatcacgaagccgatgtacgagcaaggccacctggccatcctgaagggcaacctgtcgcctgagggcgccgtggccaagatcaccggcctgaagaatcccagcatcactggcccggcgcgcgtgttcgacgacgagcagtcggcgctggccgccatcatggccaagcagatccaggccggcgacgtgatggtgctgcgctacctgggcccgatggggggcccgggcatgcccgagatgctggcgccgaccggtgcgctgatcggccaagggctgggcgaatcggtggggctcatcaccgacggccgcttctccggcggcacctggggcatggtggtcggccacgtggcacctgaggccgcggccggcggcacgatcgcgctggtgcaggaaggcgactcgatcaccatcgatgcgcacacgctggtgctcaacctcaacgtgagcgaggccgagatcgcaaagcgtcgcgccgcctggaaggcaccggcgccgcgctacacacgcggcgtgctggccaagttcgcgaagaacgcgtcaagcgccagcagcggcgcggtattggaccgcttcgagtag

SEQ ID NO: 372 - protein, 560 aa, Methylibium petroleiphilum
MSINRRSKNITEGVARAPNRSMYYAMGYQEADFKKPMIGVANGHSTITPCNSGLQKLADAAVEGIEAAGGNAQIFGTPTISDGMAMGTEGMKYSLVSREVIADCVETCVGGQWMDGVLVVGGCDKNMPGGMMGMLRANVPAIYVYGGTILPGKYKGQDLNIVSVFEAVGQFTAGNMSEEDFCQIERRAIPGSGSCGGMYTANTMSSAFEALGMSLPFASTMANVEDPIVAHTKEAARVLVEAVKADLKPRDIVTRKSIENAVAVIMATGGSTNAVLHFLAIAHAAGVEWTIDDFERVRRKVPVLCDLKPSGRYLAIDLHRAGGIPQVMKTLLAAGLIHGDCITITGRTVAENLADIPDAPRADQDVIRPITKPMYEQGHLAILKGNLSPEGAVAKITGLKNPSITGPARVFDDEQSALAAIMAKQIQAGDVMVLRYLGPMGGPGMPEMLAPTGALIGQGLGESVGLITDGRFSGGTWGMVVGHVAPEAAAGGTIALVQEGDSITIDAHTLVLNLNVSEAEIAKRRAAWKAPAPRYTRGVLAKFAKNASSASSGAVLDRFE

SEQ ID NO: 373 - DNA, 1683 bp, unknown
  gamma proteobacterium KT 71
atggcgctcaatcgtcgctccaaaaacatcaccgagggcgtccaacgtgcgcccaatcgctccatgtactacggcatgggctatgaggagggcgattttaggaagcccatggtgggcattgccaactctcactcgacgatcacgccctgtaatgcgggactccagcccctggctgatgccgctcaggaaggcctgaaagaagccggggccaatcctcaggtgtttggcacgccgaccatatccgacggcatgtccatgggtaccgagggcatgaagtactccctggtatcccgggaagttatcgctgactgcatcgaaacctgcgtgggcggtcagtggatggacggcgtgctggtgatcggtggctgtgacaaaaacatgcccggcggcatgatgggcatgctccgcgcaaacgtcccctcgatttttgtatacggcgggaccattcttcccgggcgtcacaatggtcaggatctgaacatcgtcagcgtgtttgaggcggtcggtgagcatgcggcggggcgtatcagggacgaggatttactggctatcgaacgcaatgcgattccgggaacgggctcctgcggcggtatgtataccgcaaacaccatgagctcggcctttgaggccctgggcatgagccttccttattcctcgaccatggcaaacgtcgagtccgaaatcaaagaatcagccaaggcgagcgcgctggctctggtggaggcgattcgcctggatcttaagcccagggatattgtgacccgcgagtccctggaaaatgccgttgcggtgattatggcgaccgggggatcgaccaatgcggtattacactttctggcgattgcccacgccgcggagattgactggagtatcgacgactttgagcgaatccgacaaaaagtaccggtgctctgcgatctcaagcccagcggggagtatctggccattgatctgcaccgtgctggcggcattccccaggtgatgaaaattctcttggacgggggcttgctccacggcgactgcatgaccgtaacgggcaagactattgcggaatccctggcggatgtgccttcgacgcccgtggaccccaaggtcattcgtcctctggataaccccatgtatgccaaggggcatctggcgattcttcgcggcaatctcgccgaagagggcgccgtagccaaaatcacgggtctgaaaaaccccgtgatcacgggacctgcgaaagtgtttgatgatgaacagtcggcccttgatgccattctcgcgggcaaggtcaaagccggtgacgtggtggtactgcggtatctagggccccagggcggaccgggtatgcccgagatgctggcacccaccagtgctctggtggggcagggtctcggggagtccgtaggcctgattaccgacggccgattttccgggggcacctgggggatggttgtggggcatgtggcacccgaagcctatgcgggtggtctcattgccctgatagaggagggggactccatcaccatcgatgcccataccctgagtctggaactcaatgtcgacgacaaagaaattgctcgccggcgcggcgcctgggtaaagcccgagccacgctacacccggggcgtcctcgccaagtttgcaaaaaatgcagccaccgcaagccgcggcgcggtgctggatctgtatgaggactaa

SEQ ID NO: 374 - protein, 560 aa, unknown
  gamma proteobacterium KT 71
MALNRRSKNITEGVQRAPNRSMYYGMGYEEGDFRKPMVGIANSHSTITPCNAGLQPLADAAQEGLKEAGANPQVFGTPTISDGMSMGTEGMKYSLVSREVIADCIETCVGGQWMDGVLVIGGCDKNMPGGMMGMLRANVPSIFVYGGTILPGRHNGQDLNIVSVFEAVGEHAAGRIRDEDLLAIERNAIPGTGSCGGMYTANTMSSAFEALGMSLPYSSTMANVESEIKESAKASALALVEAIRLDLKPRDIVTRESLENAVAVIMATGGSTNAVLHFLAIAHAAEIDWSIDDFERIRQKVPVLCDLKPSGEYLAIDLHRAGGIPQVMKILLDGGLLHGDCMTVTGKTIAESLADVPSTPVDPKVIRPLDNPMYAKGHLAILRGNLAEEGAVAKITGLKNPVITGPAKVFDDEQSALDAILAGKVKAGDVVVLRYLGPQGGPGMPEMLAPTSALVGQGLGESVGLITDGRFSGGTWGMVVGHVAPEAYAGGLIALIEEGDSITIDAHTLSLELNVDDKEIARRRGAWVKPEPRYTRGVLAKFAKNAATASRGAVLDLYED

SEQ ID NO: 375 - DNA, 1665 bp, Tremblaya princeps
atgaacacgaactcaagacgcataacgcatggattcaccaggtctccgaacagggccatgctctgtgccatggggtacgatggcgcagactttgccaagcccatcataggcgtaggaagcggttactccaccataacaccgtgcaatgctggcatacagcgcgtcgtcgatgcggcgaaagccatgctggcaaggcatggagccatgacgcaggttttcggcatccctaccatatccgacggcatatcaatgggcacgccgggcatgaggtactctctcgtgtctcgtgaggtgatcgctgattgtatagaggcatgtgcttgtgggcagagcatggacgggctgctagtcgtagggggctgcgataagaacctgcctggtggcatgatcgggctactacgagccaacatcccagggatttacctgtatggcggcacaatactgccagggtactggggcgccagggagctgactgtggtgagttcattcgaggcagttggcgccatgggtaggcagggcatgtctatagacgctatgcgtgaagtggagcgacacgcctgccccactacaggctcgtgcggcgggatgtacacagcaaacacaatgagcgcatcatttgaggcccttggcatgtccctgctctactcgtccactgctccgagcccaggcatcgagggtgagctatccatctcaacgtcggcacggtctctgatcaacgcagtgcgacggggcataaggccaagggacgtggtaactcacaggtccattcgcaatgccatggcggttgtaatggcagtcggcgggtctacaaacgccgtgctgcactacctggcgatagccgctgcagctcgttctgctctctcactgcacgacgttgagctaataaggaggagggtgcctgtaatatgtaacatgaagccctctggactgcatagcactgcagacctacattcagcaggcggcgttcctcgtgttatgcacgagcttgcgctcgctggtctcattgacgagtcgtgcctcacgataacgggcagaacgataggtgcagagctcctcgcggcgcaccgcaagcgccatggctctaccgttgtgctgcctactaacatggcgttataccgtacaggacgccttgttgtgctgagcggtaatatgtcaaggaacggcgcagttgccaagacttcaggccttagcatactattgcacagcggcactgccagagtgtttcgcagcgaggaggcctgtgttcaggctatactcaacggctgcgtgcgcattggcgacgtagttgtgctgatttacctaggcccaaagggagggcctggcatgcctgagatgctatccccaactgcagcgctagttggcatgggactaggccagtccgcttgcctcattacagatggtaggttctctggaggaacgtggggcctggtggtcgggcatgtatcacccgaggcagccgtgggtggctccatagcgcttgtccgtaacggcgacttcatcacagtagacctgcgcaacaactctcttcacctgcatatagacgcatggtcgcttgctgcacggcgtgcagcatggcggctaccttgcactttgtgtgtagagggactactgagaaagtaccacgatggagttggccagtctcacaatggcgccatcgctgcatag

SEQ ID NO: 376 - protein, 554 aa, Tremblaya princeps
MNTNSRRITHGFTRSPNRAMLCAMGYDGADFAKPIIGVGSGYSTITPCNAGIQRVVDAAKAMLARHGAMTQVFGIPTISDGISMGTPGMRYSLVSREVIADCIEACACGQSMDGLLVVGGCDKNLPGGMIGLLRANIPGIYLYGGTILPGYWGARELTVVSSFEAVGAMGRQGMSIDAMREVERHACPTTGSCGGMYTANTMSASFEALGMSLLYSSTAPSPGIEGELSISTSARSLINAVRRGIRPRDVVTHRSIRNAMAVVMAVGGSTNAVLHYLAIAAAARSALSLHDVELIRRRVPVICNMKPSGLHSTADLHSAGGVPRVMHELALAGLIDESCLTITGRTIGAELLAAHRKRHGSTVVLPTNMALYRTGRLVVLSGNMSRNGAVAKTSGLSILLHSGTARVFRSEEACVQAILNGCVRIGDVVVLIYLGPKGGPGMPEMLSPTAALVGMGLGQSACLITDGRFSGGTWGLVVGHVSPEAAVGGSIALVRNGDFITVDLRNNSLHLHIDAWSLAARRAAWRLPCTLCVEGLLRKYHDGVGQSHNGAIAA

SEQ ID NO: 377 - DNA, 1689 bp, Blastopirellula marina
atgtctcagcccctcaattggaatagtcgccgtttaacgcgtggatggcaaaaagggatcaccgctttttattacggcttgggactgaccgacgccgattttgacaaaccgcagatcgggatcggcgtgccgctgctggacggcaatctttgcaacgtccacgcctatcaactgggccaagagctgaaagcaggctgcgagcaagcgggactgatcgggtttccgtttggcacgccggccgttagcgataacatcacgcaaggacatgaagggggcaacgccagccttccctcgcgtaatatgatcgccaatgcggctgaatgcgtcgtcagcgcccatggctacgactttttgatcggactgcacaattgcgacaaaaacgggcccggcttcgccatggcgttggctcggctcaactatcccgggctgatcgtcaacggcggcagtattaaacctggttgccatctgggccgcgacacgtcgatcttggatgtctacgacgcccaagcggcggcttccgtgggcgcaatgacggcggacgaagcggatcagatcttgcgaaccgcttgtcccggacccggcgggtgcggcatcgccgcttcttttaatacttggggaatcgcgatcgaagcgatcgggctagggcttccctactccagttcgatcccggctgaagatccggccaaacgcgaagaatgccgcagcatcggccaagcagtcaagcatctgctgaccgagaacattcgcccccgcgatattttgaccaaaaaggcgtttgaaaacgcagccgcggtgatcgccgccgtgggcggctcgaccaacggcgtgctgcacctgatcgcgctggccaaagaagccgaagttgatttcacattgcgtgacgtgcagcggattgtccgcaacacgccggtcctgtgcagcttcgctccgcgcggcaaacgcacgatgtacgacctgcacaagctggggggtacgccgatgctgctgaagtacttgatctcggtcggcattgtcgatggttcgtgcctgaccgtctcgggcaagtcattggccgaaaacgtcaacggcgcggccgatgttcccgcggatcaagacttgatcgcgacgatcgaaaagccgttcaaagaatatgccgacatgcagatctgctttggcaacctggcgcccggcggcgtggtcttcaaagtatcgagcatgcgtgacccaaaattcagcggcaaagcgatctgcttttcggaagccaaggatatcgtcaacgcggtcgaagcgaataagatcacgccgggaaccgtgatcgtgcttcgttatctggggccggtcgcttcggggatgccggaagtgttggtcgcgaccgcggctttggccgtaccgcatctggacggcaaagtagcgtttctgtcagacacgcgcgtctctggcgtatcgcacggagcgatcggcgttcactgtgctccggaagcggcagtcggcgggccgatcgcgttggtggaagacggggatgaaatctcgtttgatctgctcggcggcgagatcacgctgcacgtcggagcagacgtgttggcgactcgcgccgccaactggaagacgcctgacctgcggcacaaacatgcctatctggccgacttcgccgcaaccgtctcgcaagccgatagcggttgcgtcagcaaagcgtttcacgacgtctcgtaa

SEQ ID NO: 378 - protein, 562 aa, Blastopirellula marina
MSQPLNWNSRRLTRGWQKGITAFYYGLGLTDADFDKPQIGIGVPLLDGNLCNVHAYQLGQELKAGCEQAGLIGFPFGTPAVSDNITQGHEGGNASLPSRNMIANAAECVVSAHGYDFLIGLHNCDKNGPGFAMALARLNYPGLIVNGGSIKPGCHLGRDTSILDVYDAQAAASVGAMTADEADQILRTACPGPGGCGIAASFNTWGIAIEAIGLGLPYSSSIPAEDPAKREECRSIGQAVKHLLTENIRPRDILTKKAFENAAAVIAAVGGSTNGVLHLIALAKEAEVDFTLRDVQRIVRNTPVLCSFAPRGKRTMYDLHKLGGTPMLLKYLISVGIVDGSCLTVSGKSLAENVNGAADVPADQDLIATIEKPFKEYADMQICFGNLAPGGVVFKVSSMRDPKFSGKAICFSEAKDIVNAVEANKITPGTVIVLRYLGPVASGMPEVLVATAALAVPHLDGKVAFLSDTRVSGVSHGAIGVHCAPEAAVGGPIALVEDGDEISFDLLGGEITLHVGADVLATRAANWKTPDLRHKHAYLADFAATVSQADSGCVSKAFHDVS

SEQ ID NO: 379 - DNA, 1692 bp, Planctomyces maris
atggatcatcctttaaactggaatagtcaaaacctgacacatggctggcaacggggagtcaccgctttttattacgggttaggcttttcggatcaggatttcgacaaggcccagatcgggattggcgtgccactcttggatggcaacctctgtaatgtgcatgcttacgatcttgcgaaagtaattgcacagggatgtcaatccgctgacatgatcggtcttccttttggagttcccgccgtcagtgacaacatcacccagggacaggaaggaggcaacgccagtctcccctctcggaatatgatcgccaacgcggccgaatgcgtcgtgagtgctcattcgtatgatgccctgattggcctgcataattgcgataaaaacggaccgggcttcgccatggcattggcacgactcaactatccgggactggtcgtcagtggtggcagtatcatgcccggctgccacaaaggacaggacatttcgatcctcgacgtctacgattcccaggcagctgcagcagtcggcgcgatggaagaagaagaagcggaccagattctgaaaaccgcctgcccgggcccggggggatgtggtatcgccgcttctttcaatacctggggcatcgcgctcgaagccatcggccttatgctcccgttcagcagttccacgccggccattgataatgcaaaaaaaacagaatgcctcaatgtcgcctctgccgtgcgaaatctcctgcagaaaaatatccggccgcgcgacatcctgacccgcaaagcatttgaaaatgcagccgccaccatcgcggccgtcggcggctccacgaatggaatcctgcatctgctcgcgctggcacgagaagcggaagtcgaattttacctgcaggacattcaggaaattcttcgaaaaacgcccgtgtattgcagttttgcaccacgcggcaaaaaaaccatggtcgacctgcatcacctgggtggcacaccggtcctcatgaaacacctgctcaaagcaggcatcatcgatggcagttgcctgactgtaaccggcagaaccctggcggaaaacctggcagaaatcggcgatgtccccacgaaccaggaactgatcgcttcgctcgatcaaccgtataaaacttacgccgacatgcagatctgctttggcaatctggcaccgggaggcattgtctttaaagtttccagcatgcaggaatcacatttcacgggaaccgcctgctgcttcgatgaagcgaaaggcgtagtcgatgccgtcgaagcaggtaagatcaaacccggcagtgtcatcgtactacgaaacctgggtccggtcgcatcaggcatgcctgaagtacttgtcgcgactgccgctctgacggtaccggaactggatggcaaagtggcattcatttcggacacacgtgtctccggtgtttcacacggtgccatcggcgtgcattgttctcccgaagcggcagtcggaggtccgattggtctgattcaggatggtgaccagatctcgttcgatctgcttaaaggagaaatcagcgttgatgtctccgaccaggaatttcagcaacgccgagtgaaaaaaccacttcaacccgtcagacattcccgcggctatctggctgatttttcagccaccacctcacaggcacatcatggctgtgtgagtaaagccctgctgccggactgcgaataa

SEQ ID NO: 380 - protein, 563 aa, Planctomyces maris
MDHPLNWNSQNLTHGWQRGVTAFYYGLGFSDQDFDKAQIGIGVPLLDGNLCNVHAYDLAKVIAQGCQSADMIGLPFGVPAVSDNITQGQEGGNASLPSRNMIANAAECVVSAHSYDALIGLHNCDKNGPGFAMALARLNYPGLVVSGGSIMPGCHKGQDISILDVYDSQAAAAVGAMEEEEADQILKTACPGPGGCGIAASFNTWGIALEAIGLMLPFSSSTPAIDNAKKTECLNVASAVRNLLQKNIRPRDILTRKAFENAAATIAAVGGSTNGILHLLALAREAEVEFYLQDIQEILRKTPVYCSFAPRGKKTMVDLHHLGGTPVLMKHLLKAGIIDGSCLTVTGRTLAENLAEIGDVPTNQELIASLDQPYKTYADMQICFGNLAPGGIVFKVSSMQESHFTGTACCFDEAKGVVDAVEAGKIKPGSVIVLRNLGPVASGMPEVLVATAALTVPELDGKVAFISDTRVSGVSHGAIGVHCSPEAAVGGPIGLIQDGDQISFDLLKGEISVDVSDQEFQQRRVKKPLQPVRHSRGYLADFSATTSQAHHGCVSKALLPDCE

SEQ ID NO: 381 - DNA, 1686 bp, Microcystis aeruginosa
atggcagataactacagaagtcgcattgttacccaaggtacccaacgcagtcctaatcgggccatgttaagagcggtaggttttggggatgaggactttagcaaaccaatcatcggcattgctaacggatttagcaccattaccccctgtaacatgggaattaatgatttagcaatgcgtgccgaagcagccaccagattagcggggggaatgccgcaacttttcgggactatcaccattagtgacgggatttccatgggaacagaaggaatgaaatattctctcgtttctagggaagtaatcgccgattccattgaaaccgtctgtaatggtcaaagtctcgatggagtcctcgctatcgggggttgtgacaaaaatatgccgggagcaatgattgccatggcccggatgaatattcccgctattttcgtctatggtggcacaattaaaccgggacgctacaaagattgcgatttaaccgtggtcagttcctttgaagccgtgggacagtacagcgccggtaaaatcagcgaagaagacctcatcgggattgaacgcaacgcttgccccggtgctggttcctgtggtggaatgtttactgctaataccatgtcttccatttttgaagccatggggatgagtttaccctattcctcaaccatggccgccgaagatgaggaaaaagccgatagtaccgaagaatcggccaaggttttagtcgaggcggttagaaaacagattctacctagccaaattttgacccgtaaagcctttgaaaacgccatttcggtaattatggcggtgggaggttccactaacgctgtcctgcaccttttagccatttcccgcaccatcggggtagaattatcgatcgatgattttgaaaccatccgccagcgtgtaccagttatctgcgatcttaaaccctccgggcgttacgttaccgtagatctgcataaagccggcggtattccccaagtgatgaaaattctcctggttaatggtttactacacggggatgctctcaccattagcggtcagactatcgccgagattttagccgatattcccgaccaaccgccctcaggccaagatgttatccgtccttttagcaatcctgtctataaagagggtcatttagccattttaaaaggaaatctggccacggaggggtctgtggccaaaatcagcggcgtgaaaactccggtcatcactgggcccgcgcgggtgtttgagtcggaagaaacctgtttagaggcaattttagccggaaaaattcaagccggggatgtggtggttgtccgttacgagggaccagtaggcggaccgggtatgcgggaaatgttagcccccacttcggcaattatcggcgctggtttaggggattccgtgggattaattaccgatggtcgtttttccgggggaacctatggcatggtagttggtcacgtcgctccagaagcggcggtgggtggtacaattgccctagtagaggaaggggatcaaatcactattgatgctcgtcaacgtctcttgagtttaaatgtatcggaggaagaattaacccgtcgtcgtcaccattggcaaccgcgtcccccacgctataaaacgggaattctcggcaaattcgccaagttagtctcctctagcagtctcggcgctttaacggatttgaatctgttctaa

SEQ ID NO: 382 - protein, 561 aa, Microcystis aeruginosa
MADNYRSRIVTQGTQRSPNRAMLRAVGFGDEDFSKPIIGIANGFSTITPCNMGINDLAMRAEAATRLAGGMPQLFGTITISDGISMGTEGMKYSLVSREVIADSIETVCNGQSLDGVLAIGGCDKNMPGAMIAMARMNIPAIFVYGGTIKPGRYKDCDLTVVSSFEAVGQYSAGKISEEDLIGIERNACPGAGSCGGMFTANTMSSIFEAMGMSLPYSSTMAAEDEEKADSTEESAKVLVEAVRKQILPSQILTRKAFENAISVIMAVGGSTNAVLHLLAISRTIGVELSIDDFETIRQRVPVICDLKPSGRYVTVDLHKAGGIPQVMKILLVNGLLHGDALTISGQTIAEILADIPDQPPSGQDVIRPFSNPVYKEGHLAILKGNLATEGSVAKISGVKTPVITGPARVFESEETCLEAILAGKIQAGDVVVVRYEGPVGGPGMREMLAPTSAIIGAGLGDSVGLITDGRFSGGTYGMVVGHVAPEAAVGGTIALVEEGDQITIDARQRLLSLNVSEEELTRRRHHWQPRPPRYKTGILGKFAKLVSSSSLGALTDLNLF

SEQ ID NO: 383 - DNA, 1839 bp, Salinibacter ruber
gtgaggctgccgtctttcacgcttcacgtttcacgcatcacgaaaacagcaccttctttcccttccacttttcccttttgcccaatgcccccctcctccgccaacggccactcctccaaaatccagagccaagacgtcaccgagggccttgaccaggcgccggcccgcgcgatgtttcgggcgatgggctacgacgacgccgacctcgaccagcccctcatcggcatcgccaacccggcggcggacgtgacgccctgcaatgtgcacctcgacggccttgccgacgccgcacgcgaaggcgtcactgaggccggcgggacgcccatcgagtttggcaccatcacggttagcgacgggatctcgatgggcacggagggcatgaaggggtccctcatctcccgcgaggtgatcgccgactcggtggaactggtggcctttgccgagcggctcgacgggctcgtcatcatgggcggctgcgacaaaaacatgccgggcatgatgatggcggcgatccgggccgacctcccgagcgtcttcctctacggcgggtccatcatgccgggccaccaccgggggcaggagatcacgatccagaacgtgttcgaggcgtgcggggcggtcgccaccggccagatgagcgaagaggagctcgacgagatggagcgccacgcctgtcccggcgccggcgcctgcggcggcatgttcaccgctaacacaatggcgtccatcagcgaggcgatcggctttgcgccgctggggagcgcgagccccccggcggtgacagaagaacgagaggtggtggcccgcgcggccgggcggcggaccgtcgaggcgatcgaggaacggcggcggccctccgacttcctcagcaagaagtcgttcgagaacgccattgccctccaggtggccgtgggcggctccacgaacggcgtactccacctgctcgcgatggcggcggaggcgggcatcgacctctcgattgaggcgttcgacgcaatcagccggcggacgcccaagatcggcgacttccagcccggcggctcccgcgtgatgaacgacctgcacgaggtcggcggcgtgccggtggtgctgaaggcgcttctcgatgcgggcctgctgcacggcgacgcccagaccgtgacgggggagcccctcgccgaggccctcgaccgcgtcgacccgcccgccatcgcggacctcgacgtggactacctctacacggtggacgaaccgaagaatgaggagggcgccatccgcatcctcaccggcaacctcgcccccgacggcgctgtgctcaaagttacagccgctgatgccccccgctttgagggcacggcccgcgtcttcgagagcgaggaggacgcaatggactacgtgcaggccggccagctcgactcgggcgacgtcattatcattcggaatctcgggcccaagggcgcccccggcatgcccgaaatgcttggcgtgaccgccgcccgggacggacaggggcacgccgacgacgtggccctcatcaccgacgggcgcttctccggggccacccgcggcctctccatcggccacgtcgcccccgaggccgcggccggcgggcccatcgccgccatccaggacggagacccgatcatcatcgacgtggcggagcgtcacctggcggtcgacctgtccgacgccgagctggagcgccgactcgacgaccggtcgcccccggagccccagtacacgaccggcgttctcgccaagtacgccgccctcttcggctccgccgcggagggggcagtgacgagtgtcttttcggatcttcgcgagtcgacatccccctccacggcttcaaatgaatga

SEQ ID NO: 384 - protein, 612 aa, Salinibacter ruber
MRLPSFTLHVSRITKTAPSFPSTFPFCPMPPSSANGHSSKIQSQDVTEGLDQAPARAMFRAMGYDDADLDQPLIGIANPAADVTPCNVHLDGLADAAREGVTEAGGTPIEFGTITVSDGISMGTEGMKGSLISREVIADSVELVAFAERLDGLVIMGGCDKNMPGMMMAAIRADLPSVFLYGGSIMPGHHRGQEITIQNVFEACGAVATGQMSEEELDEMERHACPGAGACGGMFTANTMASISEAIGFAPLGSASPPAVTEEREVVARAAGRRTVEAIEERRRPSDFLSKKSFENAIALQVAVGGSTNGVLHLLAMAAEAGIDLSIEAFDAISRRTPKIGDFQPGGSRVMNDLHEVGGVPVVLKALLDAGLLHGDAQTVTGEPLAEALDRVDPPAIADLDVDYLYTVDEPKNEEGAIRILTGNLAPDGAVLKVTAADAPRFEGTARVFESEEDAMDYVQAGQLDSGDVIIIRNLGPKGAPGMPEMLGVTAARDGQGHADDVALITDGRFSGATRGLSIGHVAPEAAAGGPIAAIQDGDPIIIDVAERHLAVDLSDAELERRLDDRSPPEPQYTTGVLAKYAALFGSAAEGAVTSVFSDLRESTSPSTASNE

SEQ ID NO: 385 - DNA, 1731 bp, Methylobacterium chloromethanicum
atggacgcgcgtcagaccgacaagtcgaagctgccgagccggcacgtgacggaggggcccgagcgggcgccccaccgctcgtacctctacgccatgggcctgacgaccgagcagatccaccagccgctggtcggcgtcgcctcgtgctggaacgaggccgcgccctgcaacatctcgctgatgcgccaggcccaggccgtgaagaagggcgttgccgccgccaagggcaccccgcgcgagttctgcaccatcaccgtcaccgacggcatcgccatgggccatggcggcatgcgtgcctcgctgccgtcgcgcgaggtcatcgccgattcggtcgagctgacgatccgcggccattcctacgacgccctcgtggggctggccggctgcgacaagtccctgcccggcatgatgatggccatggtgcgcctcaacgtgccgtcaatcttcatctatggcggctcgatcctgccgggctcgttccggggccggccggtcacggtgcaggatctgttcgaggcggtcggcaaggtcgccgtcggtgacatgagcctcgacgacctcgacgagctggagcgggtcgcctgcccctcggccggcgcctgcggcgcgcagttcaccgccaacaccatggccaccgtctccgaggcgatcggcctcgcgctgccctactcggccggcgcgcctgccccttatgagatccgcgaccaattctgcgccgccgccggcgagaaggtgatggagctgatcgccaagaacatccgcccgcgcgacatcgtcacccgcaaggccctggagaacgccgctgcgacggtcgcggcctcgggcggttcgaccaacgcggccctgcacctgccggcgatcgcgcatgaatgcggcatcgagttcaccctgttcgacgtcgccgagatcttccgcaagaccccctacatcgccgacctgaagcccggtgggcgctacgtggccaaggacatgttcgaggtcggcggcatcccgctgctgatgaagacgctgctcgaccacggctacctgcacggcgactgcctcaccgtcaccggccgcaccatcgcggagaacctcgccaaggtcgcctggaacccggatcaggacgtcgtgcgcccggccgataagcccatcaccgtcaccggcggcgtggtgggccttcgcggcaatctcgcccccgagggcgcgatcgtgaaggtcgccggcatgccgcccgaggcccaggtcttcaccggcccggcccgcgtcttcgacggcgaggaagcctgtttcgaggcggtgcagaaccgcacctacaagcccggcgacgttctggtcatccgttacgagggcccgaagggaggccccggcatgcgcgagatgctctcgaccaccgccgccctctacggccagggcatgggcgacaaggtggccctcatcaccgacgggcgcttttccggcgcgacccgcggcttctgcgtcggccatgtcggccccgaggctgccatcggcgggccgatcggcctgctgcgcgacggcgacatcatcaccctcgacgcgatcaagggcacgctcgacgtggcgctctccgacgaggaactggcccagcgtcgcagcgaatgggcgccgcggggcaatgccgcgacctccggctacctctggaaatatgcgcagtccgtcggacctgcggtgaacggggccgtgacgcatccgggcggcgcgggggagacgaacgtctatgccgacatctag

SEQ ID NO: 386 - protein, 576 aa, Methylobacterium chloromethanicum
MDARQTDKSKLPSRHVTEGPERAPHRSYLYAMGLTTEQIHQPLVGVASCWNEAAPCNISLMRQAQAVKKGVAAAKGTPREFCTITVTDGIAMGHGGMRASLPSREVIADSVELTIRGHSYDALVGLAGCDKSLPGMMMAMVRLNVPSIFIYGGSILPGSFRGRPVTVQDLFEAVGKVAVGDMSLDDLDELERVACPSAGACGAQFTANTMATVSEAIGLALPYSAGAPAPYEIRDQFCAAAGEKVMELIAKNIRPRDIVTRKALENAAATVAASGGSTNAALHLPAIAHECGIEFTLFDVAEIFRKTPYIADLKPGGRYVAKDMFEVGGIPLLMKTLLDHGYLHGDCLTVTGRTIAENLAKVAWNPDQDVVRPADKPITVTGGVVGLRGNLAPEGAIVKVAGMPPEAQVFTGPARVFDGEEACFEAVQNRTYKPGDVLVIRYEGPKGGPGMREMLSTTAALYGQGMGDKVALITDGRFSGATRGFCVGHVGPEAAIGGPIGLLRDGDIITLDAIKGTLDVALSDEELAQRRSEWAPRGNAATSGYLWKYAQSVGPAVNGAVTHPGGAGETNVYADI

SEQ ID NO: 387 - DNA, 1797 bp, Schizosaccharomyces pombe
atgatgttctgcaagcttctccgttgtcaaaacggtattgctagcaaaagagctgcattaagcctaaaaggctttaaaacctcttcgatcaatttagtcgagaagaaattgaacaagtatagtgaaacaatcactggtccgaagtctcagggtgcttcccaagctatgttatatgctactggacttaatgaggaggacatgaaaaaaccccaagtcggcattgctagttgttggtatgaaggaaatccttgcaatatgcatttacttgatctcggtcgacgagtgaaagaaggtgtcaaaaaggctggattgaccggattccagtttaatactattggtgttagtgatggtatttctatgggtactactggtatgcgttatagtttgcaatctcgtgagattattgcagactccattgagaccgtcatgcaaggtcaatggtatgatgccaacgtctctattcctggctgtgacaaaaacatgcctggttgtttaatcgctatgggaagattcaaccgccctagtattatggtttacggcggtagtattcgtgctggtcactctccttgtcagaacaatgcacccatcgatattgtttctgcttttcaatcctatggtgaatttatcacaggaaaaattgatgagccaacccgtcatgacattattcgtcatgcatgtcctggaggtggtgcttgtggtggtatgtatactgcaaatacaatggctagctgtgccgaagctatgggtatgacattacccggttcttcttcttaccttgctggctcacctgagaagtttgcagaatgcgaagctgcaggtagtgctataaagcgacttttggttgacgacattaaacctcgcgacatcatgacacgttctgcttttgaaaatgctatggtcttgacgatgactcttggtggctctaccaactctgttcttcatttgatcgcaattgctaagtctgttggtatcactttaactttggatgatttccaagccgtcagtaaccgtacaccgtttattgccgatatgaagcctagcgggaagtacgttatggaagatttgttcgctatcggaggtattccttcagtacttaaatatctccatgctgaaggtctcatcgatggttctaatattaccgttactggtaaaactctcgctgagaacctacgaggattcaaggaccttgccgaaggtcaaaagatcattagacctttgagcaaccccatcaagaccgagggtcatttacgtgtcctccgtggttctttagcccctgaaggttctgtcgcaaagattactggcaaagagggcttgaacttcaccggcaaagctcgtgtttttgatgccgaaaacgattttattgctgccttagagcgtggtgagttcaagaagggcgagaagactgtcgtcattattcgttttgagggaccaaaaggtggacctggtatgccggaaatgttaaagccttcaagtgctattatgggagctggtcttggaaaggatgttgcacttttgactgacggtcgtttcagtggtggctctcacggatttttgattggacacgttgatcccgaagcacaagttggaggccctattgctcttgttcaggacggcgatgtcattgaaatcaatgctgtaaagaacactttagatttgatggttgatgagaaggagatggcgagacgccgcagtgtttggaaggcacctcctttgaagtaccaacaaggaacccttttaaaatatgctcgcaacgttagcactgcctccaagggtgctgttacagattccttagagtaa

SEQ ID NO: 388 - protein, 598 aa, Schizosaccharomyces pombe
MMFCKLLRCQNGIASKRAALSLKGFKTSSINLVEKKLNKYSETITGPKSQGASQAMLYATGLNEEDMKKPQVGIASCWYEGNPCNMHLLDLGRRVKEGVKKAGLTGFQFNTIGVSDGISMGTTGMRYSLQSREIIADSIETVMQGQWYDANVSIPGCDKNMPGCLIAMGRFNRPSIMVYGGSIRAGHSPCQNNAPIDIVSAFQSYGEFITGKIDEPTRHDIIRHACPGGGACGGMYTANTMASCAEAMGMTLPGSSSYLAGSPEKFAECEAAGSAIKRLLVDDIKPRDIMTRSAFENAMVLTMTLGGSTNSVLHLIAIAKSVGITLTLDDFQAVSNRTPFIADMKPSGKYVMEDLFAIGGIPSVLKYLHAEGLIDGSNITVTGKTLAENLRGFKDLAEGQKIIRPLSNPIKTEGHLRVLRGSLAPEGSVAKITGKEGLNFTGKARVFDAENDFIAALERGEFKKGEKTVVIIRFEGPKGGPGMPEMLKPSSAIMGAGLGKDVALLTDGRFSGGSHGFLIGHVDPEAQVGGPIALVQDGDVIEINAVKNTLDLMVDEKEMARRRSVWKAPPLKYQQGTLLKYARNVSTASKGAVTDSLE

SEQ ID NO: 389 - DNA, 1758 bp, Saccharomyces cerevisiae
atgggcttgttaacgaaagttgctacatctagacaattctctacaacgagatgcgttgcaaagaagctcaacaagtactcgtatatcatcactgaacctaagggccaaggtgcgtcccaggccatgctttatgccaccggtttcaagaaggaagatttcaagaagcctcaagtcggggttggttcctgttggtggtccggtaacccatgtaacatgcatctattggacttgaataacagatgttctcaatccattgaaaaagcgggtttgaaagctatgcagttcaacaccatcggtgtttcagacggtatctctatgggtactaaaggtatgagatactcgttacaaagtagagaaatcattgcagactcctttgaaaccatcatgatggcacaacactacgatgctaacatcgccatcccatcatgtgacaaaaacatgcccggtgtcatgatggccatgggtagacataacagaccttccatcatggtatatggtggtactatcttgcccggtcatccaacatgtggttcttcgaagatctctaaaaacatcgatatcgtctctgcgttccaatcctacggtgaatatatttccaagcaattcactgaagaagaaagagaagatgttgtggaacatgcatgcccaggtcctggttcttgtggtggtatgtatactgccaacacaatggcttctgccgctgaagtgctaggtttgaccattccaaactcctcttccttcccagccgtttccaaggagaagttagctgagtgtgacaacattggtgaatacatcaagaagacaatggaattgggtattttacctcgtgatatcctcacaaaagaggcttttgaaaacgccattacttatgtcgttgcaaccggtgggtccactaatgctgttttgcatttggtggctgttgctcactctgcgggtgtcaagttgtcaccagatgatttccaaagaatcagtgatactacaccattgatcggtgacttcaaaccttctggtaaatacgtcatggccgatttgattaacgttggtggtacccaatctgtgattaagtatctatatgaaaacaacatgttgcacggtaacacaatgactgttaccggtgacactttggcagaacgtgcaaagaaagcaccaagcctacctgaaggacaagagattattaagccactctcccacccaatcaaggccaacggtcacttgcaaattctgtacggttcattggcaccaggtggagctgtgggtaaaattaccggtaaggaaggtacttacttcaagggtagagcacgtgtgttcgaagaggaaggtgcctttattgaagccttggaaagaggtgaaatcaagaagggtgaaaaaaccgttgttgttatcagatatgaaggtccaagaggtgcaccaggtatgcctgaaatgctaaagccttcctctgctctgatgggttacggtttgggtaaagatgttgcattgttgactgatggtagattctctggtggttctcacgggttcttaatcggccacattgttcccgaagccgctgaaggtggtcctatcgggttggtcagagacggcgatgagattatcattgatgctgataataacaagattgacctattagtctctgataaggaaatggctcaacgtaaacaaagttgggttgcacctccacctcgttacacaagaggtactctatccaagtatgctaagttggtttccaacgcttccaacggttgtgttttagatgcttga

SEQ ID NO: 390 - protein, 585 aa, Saccharomyces cerevisiae
MGLLTKVATSRQFSTTRCVAKKLNKYSYIITEPKGQGASQAMLYATGFKKEDFKKPQVGVGSCWWSGNPCNMHLLDLNNRCSQSIEKAGLKAMQFNTIGVSDGISMGTKGMRYSLQSREIIADSFETIMMAQHYDANIAIPSCDKNMPGVMMAMGRHNRPSIMVYGGTILPGHPTCGSSKISKNIDIVSAFQSYGEYISKQFTEEEREDVVEHACPGPGSCGGMYTANTMASAAEVLGLTIPNSSSFPAVSKEKLAECDNIGEYIKKTMELGILPRDILTKEAFENAITYVVATGGSTNAVLHLVAVAHSAGVKLSPDDFQRISDTTPLIGDFKPSGKYVMADLINVGGTQSVIKYLYENNMLHGNTMTVTGDTLAERAKKAPSLPEGQEIIKPLSHPIKANGHLQILYGSLAPGGAVGKITGKEGTYFKGRARVFEEEGAFIEALERGEIKKGEKTVVVIRYEGPRGAPGMPEMLKPSSALMGYGLGKDVALLTDGRFSGGSHGFLIGHIVPEAAEGGPIGLVRDGDEIIIDADNNKIDLLVSDKEMAQRKQSWVAPPPRYTRGTLSKYAKLVSNASNGCVLDA

SEQ ID NO: 391 - DNA, 1752 bp, Kluyveromyces lactis
atgttttcacagtctgctgtaagaaggttttcaaccactagaaatgtgggcaagaagttgaacaagtactcgcatatcatcaccgaaccaaaggaccagggtgcatcgcaagcgatgctttatgccacggggtttaaggaagacgatttcggcaaggctcaagttggtgttggttcatgttggtggtctggtaatccatgtaatatgcatttgatggatttcaacaacagaatcaccgaatccgttaacaaggctgggttgaaaggtatgcaattcaataccattggtgtttctgatggtatttccatgggtaccaagggtatgagatattctttgcaatctagagaagttattgctgattcgttcgaaaccattatgatggctcaacattacgatgccaatatcgccattccatcttgtgataaaaacatgcctggtgttttgatggctatgggtagacataacagaccttccattatggtttatggtggtaccattttgccaggttctccaacttgtggttctgctaagattccaaagaagattgacgttgtttctgcgttccagtcctatggtcaatacttatccaaggaatttactgaaactgaaagacaagatgttgtgcaacatgcttgtccaggtccaggttcttgtggtggtatgtacactgctaacaccatggcctctgtggccgaagtcttgggtatgactttgccaaactcttcctctttcccagcagtttcaaaggaaaaattgaacgaatgtgacactatcggtgaagctatcaagaagactatggaactaggaattactcctcgtgacgttatgaccaaagaagctttcgaaaacgctatgacatatgtcattgctaccggtggttccactaacgctgttcttcatatggttgctgtcgctcactctgccggtgtcaagattactccagatgatttccaaagaattagtgacaagactccattgttgggtgatttcaaaccttctggtaaatatgtgatggcagatttgattaccgtcggtggtacccaagctgttatcaaatacttgtacgaagaaggcttcctacatggtaacactattaccatctccggtgacactttagcagaaagagcagctaaggctgtatctttgaaggatggtcaagacatcattcgtcctctaactaacccaattaagacaagtggtcatttacaaattctatacggaagtttggccccaggtgggtcagtcggaaaaattactggtaaagaaggtacttacttcaagggtaaggctagagtattcaacgacgaaccaggctttatttctgctttagaaaacggtgaaatcaagaagggtgaaaaaaccgttgtcattatcagatacgaagggccaagaggtggtccaggtatgcctgaaatgttaaagccatcttctgcattgatgggttacggtctaggtaaggatgttgctctattgactgacggtagattctccggtggttctcacggtttcttgatcggtcacatcgtcccagaagctgccgaaggtggtcctatcggtttggttcgtgacggtgacgaaattatcattgatgctgataacaacaagattgacttgttagttccagaagaagaaatcgctgaacgtagaagtacatggactgctccacctccacgttatactagaggatgtttatccaagtacgcaaaattggtttcaaatgcttcccatggttgcgtgactgatttgaactaa

SEQ ID NO: 392 - protein, 583 aa, Kluyveromyces lactis
MFSQSAVRRFSTTRNVGKKLNKYSHIITEPKDQGASQAMLYATGFKEDDFGKAQVGVGSCWWSGNPCNMHLMDFNNRITESVNKAGLKGMQFNTIGVSDGISMGTKGMRYSLQSREVIADSFETIMMAQHYDANIAIPSCDKNMPGVLMAMGRHNRPSIMVYGGTILPGSPTCGSAKIPKKIDVVSAFQSYGQYLSKEFTETERQDVVQHACPGPGSCGGMYTANTMASVAEVLGMTLPNSSSFPAVSKEKLNECDTIGEAIKKTMELGITPRDVMTKEAFENAMTYVIATGGSTNAVLHMVAVAHSAGVKITPDDFQRISDKTPLLGDFKPSGKYVMADLITVGGTQAVIKYLYEEGFLHGNTITISGDTLAERAAKAVSLKDGQDIIRPLTNPIKTSGHLQILYGSLAPGGSVGKITGKEGTYFKGKARVFNDEPGFISALENGEIKKGEKTVVIIRYEGPRGGPGMPEMLKPSSALMGYGLGKDVALLTDGRFSGGSHGFLIGHIVPEAAEGGPIGLVRDGDEIIIDADNNKIDLLVPEEEIAERRSTWTAPPPRYTRGCLSKYAKLVSNASHGCVTDLN

SEQ ID NO: 393 - DNA, 1770 bp, Candida albicans
atgagttttgtcaaatcttgcagagggtgtcttaggacatttgctacatccacaatcaagcatgagaaaaagttaaacaagtactcgtctattgtcacaggcgacccatctcagggtgcttcccaagcaatgctttatgccactggtttcagtgatgaagatttcgatcgtgcacaaatcggtgtcggttctgtttggtggtcaggtaacccatgtaacatgcacttgatggagttgaacaacaggtgttccgaatcagtcaacaaggccggcttaaaagccatgcaattcaactccattggtgtgtcggacggtatcaccaacggaactgaaggtatgaagtactctttacagctgagagaaattatcgccgactcctttgaaaccatgaccatggcccaactatatgacggtaacattgccattccttcatgtgataaaaatatgcccggggtattgatggctatgggaagacacaacagacctgccattatggtctatggtggtactatcttgcctggatctccaacttgcggaacccaaaaccctgctgtagccgacaaaatcgatatcattagtgctttccaatcctacggacaatacttgtcaaaacaaatcaacaacgaagaaagaatagatattgtcaaacatgcctgtccagggcccggtgcatgtggtggtatgtacactgccaacactatggcctctgcctctgaagtcttggggttgaccttaccattttcgtcctcgtccccggcagtctccaaagaaaaagccgaagagtgtgccaacgtcgggttcgccttaaagaatttgttagagttggacttgaaaccaagagatattgtcaccaaaaaatcatttgaaaacgctattgcttatatcattgccactggtggttctactaatgccgttttacatcttattgccattgcctcttcatttgacattactattactgttgacgatttccaaagaatctccgacaacactcccttgttggccgatttcaaaccatcgggtaaatacgttatggccgacttgcaaaatgtcggcggtacacctgctgttatgaaatacttgatcaaagaaggcattatcgacggtacccaattgagtgtcaccggtaaaaccatcaacgaaaacttggctaaacttgctgatttgcctgagggccaagacattgttagaccagtatcaaacccattgaagccaagtggccacttacaaatcttgaaaggtactttggctccagggtctgctgtcgctaaaatcaccggtaaagaaggtacttatttcaaaggtaaagctagagtattcaacgacgaaggtgcatttattgttgccttggaaaatggcgagatcaaaaaaggcgaaaaaacagtttgtgtgatcagatacgaaggtccaaaaggtggtccaggtatgccagaaatgttgaaaccttcgtctgcattaatgggttacgggttaggtaaagacgttgctttgttgactgatggtagattttcgggtggttcccacgggttccttattggccacattgttcctgaagccgctgaaggtggtccaattgctttggttgaagatggcgatattattgtcatcgacgcagacaataacaaaatcgatttgttggttgagccagacgtcttgaccgaaagaagaaaacactggacgcctccagaaccaagatacaaaagaggtactttggccaaatacgccaagttggtcagcgatgcatctaagggatgtgttacagatttataa

SEQ ID NO: 394 - protein, 589 aa, Candida albicans
MSFVKSCRGCLRTFATSTIKHEKKLNKYSSIVTGDPSQGASQAMLYATGFSDEDFDRAQIGVGSVWWSGNPCNMHLMELNNRCSESVNKAGLKAMQFNSIGVSDGITNGTEGMKYSLQSREIIADSFETMTMAQLYDGNIAIPSCDKNMPGVLMAMGRHNRPAIMVYGGTILPGSPTCGTQNPAVADKIDIISAFQSYGQYLSKQINNEERIDIVKHACPGPGACGGMYTANTMASASEVLGLTLPFSSSSPAVSKEKAEECANVGFALKNLLELDLKPRDIVTKKSFENAIAYIIATGGSTNAVLHLIAIASSFDITITVDDFQRISDNTPLLADFKPSGKYVMADLQNVGGTPAVMKYLIKEGIIDGTQLSVTGKTINENLAKLADLPEGQDIVRPVSNPLKPSGHLQILKGTLAPGSAVAKITGKEGTYFKGKARVFNDEGAFIVALENGEIKKGEKTVCVIRYEGPKGGPGMPEMLKPSSALMGYGLGKDVALLTDGRFSGGSHGFLIGHIVPEAAEGGPIALVEDGDIIVIDADNNKIDLLVEPDVLTERRKHWTPPEPRYKRGTLAKYAKLVSDASKGCVTDL

SEQ ID NO: 395 - DNA, 1815 bp, Pichia stipitis
atgagttttttatttaaggctgctgccgcacgccgtgttgcctccaagtcgcctgctgctgtggccagatcgttttctgtctctgctactcaatgtgaaaagaaattgaacaagtactcttcgattgtcactggtgatccctcccagggtgcttcgcaagccatgctctatgccacaggtttcgacgatgccgacttcaacagagcccagatcggtgtgggctcagtttggtggtcaggtaatccttgcaacatgcacttgatggagttgaacaacaagtgtactgaatcagtcaacagagctggtttgaagggaatgcaattcaactcgattggtatttccgatgggatcactaacggaactgaaggaatgagatactctcttcaatctcgtgaaattattgctgactcgttcgaatccatgatgcttggtcaattgtacgatggtaacattgccattccatcctgtgacaagaatatgcctggtgtcttgattgctatggccagacacaacagaccttctattatggtctatggtggtacaatcttgccaggtcaaactacttgcggaaccaacaacccagctatcgccgacaaaattgatatcatctcagctttccagtcgtatggacagtacttgaccaagtccatcactaacgaagaaagaaaggatatcgttagacacgcctgtcctggtcctggtgcctgtggtggtatgtatactgctaacaccatggcatctgcagctgaatgtcttggtatgtctttgccctattcatcttcggctccagccgtctcaaaggaaaaggatgctgagtgtgccaacatcggtcaagccatcaagcacttgttggagatcgacttgaagccccgtgatattttgactaagaaatctttcgaaaacgctatcgcttatatcattgctactggtggatctacgaatgctgtattgcacttaattgccattgcttcctcagctgatattgatcttaccgtagatgatttccagagaatctccgactccactccgttgttggcagacttcaagccatcgggacaattcgtaatggcagacttacagaagtacggtggtactccagccgtgatgaaattcttgatgaacgaaggcttcattgacggagaccagtacactgtcactggtaagaccatcaaggaaaatttggcttccgtcaaggacttgcctgctgatcagcctatcatcagaccagtcagcaaccccttgaagacaagcggtcacttgcaaatcttgaagggttccttggctccaggttctgctgtcggtaagatcaccggtaaggaaggtacctacttcaagggtaaggctcgtgtctttgatgacgaaggagacttcattgtcgccttggagaagggtgagattaagaagggtgaaaagaccgtctgtgtcatcagatacgaaggtccaaaaggaggccccggtatgcctgaaatgttgaagccttcctcggccttgatgggttatggtttaggtaaagatgttgctcttttgacagacggtaggttctctggtggatcccacggcttcttgattgggcacattgttcctgaagctgctgaaggtggacctatcggtttggtgtacgatggtgacgaaatcgtcattgatgccgaaaacaacaagatcgacttgttagtagacgaagctgtgttggctgaaagaagaaagttatggactgctcctgagccaagatacaccaggggtactttggccaagtacgccagattggtcagtgacgcttctgctggatgcgttaccgacttgccaataaagaattaa

SEQ ID NO: 396 - protein, 604 aa, Pichia stipitis
MSFLFKAAAARRVASKSPAAVARSFSVSATQCEKKLNKYSSIVTGDPSQGASQAMLYATGFDDADFNRAQIGVGSVWWSGNPCNMHLMELNNKCTESVNRAGLKGMQFNSIGISDGITNGTEGMRYSLQSREIIADSFESMMLGQLYDGNIAIPSCDKNMPGVLIAMARHNRPSIMVYGGTILPGQTTCGTNNPAIADKIDIISAFQSYGQYLTKSITNEERKDIVRHACPGPGACGGMYTANTMASAAECLGMSLPYSSSAPAVSKEKDAECANIGQAIKHLLEIDLKPRDILTKKSFENAIAYIIATGGSTNAVLHLIAIASSADIDLTVDDFQRISDSTPLLADFKPSGQFVMADLQKYGGTPAVMKFLMNEGFIDGDQYTVTGKTIKENLASVKDLPADQPIIRPVSNPLKTSGHLQILKGSLAPGSAVGKITGKEGTYFKGKARVFDDEGDFIVALEKGEIKKGEKTVCVIRYEGPKGGPGMPEMLKPSSALMGYGLGKDVALLTDGRFSGGSHGFLIGHIVPEAAEGGPIGLVYDGDEIVIDAENNKIDLLVDEAVLAERRKLWTAPEPRYTRGTLAKYARLVSDASAGCVTDLPIKN

SEQ ID NO: 397 - DNA, 1705 bp, Yarrowia lipolytica
ctacgctactaaggcgcacactttgaacaagttctccaagatcatcacggagcccaagtcgcagggagcctctcaggctatgctgtacgcctgcggcttcaacgaggccgatctgggcaagccccaggttggtgtcgcctccgtctggtggtccggaaacccctgcaacatgcacctgcttgatctcaacttcaaggtcaaggagggcatcgagaagcacaacctcaaggccatgcagttcaacactattggtgtgtctgatggtatttctatgggtaccaagggtatgcgatattctctgcaatctcgagacatgattgctgactccattgagactctcatgatggcccagcactacgacgccaacatctccatcccgggctgtgacaagaacatgcccggtgttctcatggccatgggccgagtcaaccgaccctccatcatgctgtacggaggaaccatccaccccggaaaggccgagactcgaaagggcgaggacattgatattgtttccgccttccaggcctacggacagtacattgccggcggcatctctgagaccgagcgagccgatgttattcgacacgcctgccccggtcagggagcctgtggaggtatgtacactgctaacaccatggcttctgccgcagaggtgcttggtatgactctgcctggctcctcctccgctcccgccatctccaaggagaagatggccgagtgtgaggctctgggacctgccatcaacaagctgctggagatggacctcaagcctaaggatatcatgacccgacaggcctttgagaacgctattgcttacatcattgccactggaggctccaccaacgccgttctccatctgctggctatcgctcacaccgtcgacgttcctttgaccattgacgacttccagcgaatctccgataacactcctctgctcgccgacttcaagccctccggagctcacgtcatggccgatctgcagaagtggggtggaacccccgccgtcatcaagatgctcattgagcagggtttcattgatggctctcccatgacctgttccggagagtctctcaaggacaccgtcgccaagtacccctctctccccaaggagcaggatatcttcgcctctgttgacgctcccctcaagccctctggtcatctgcagattcttaagggctcccttgctcccggtggatccgtcggaaagatcaccggaaaggagggaacattcttcaagggtaccgcccgatgtttcgacgaggaggacctgttcattgaggctctggagaagggcgagatcaagaagggcgagaagacctgtgtcattattcgatacgagggccccaagggaggacccggtatgcccgagatgctcaagccctcttctgccctgatgggatacggtctgggcaaggatgttgctctgctgaccgacggacgattctccggaggatctcatggtttcctcattggtcacattgtccccgaggcttacgagggaggtcccattggtctggttgaggacggcgatgagatcatcatcgacgctgacaacaacatcatcgacctgcttgttgatgagaagaccatggctgagcgaaaggccaagtggactccccccgctcctcgatacacctctggaaccctgcacaagtactccaagcttgtgtccgacgcctccactggctgtatcactgacgcctaa

SEQ ID NO: 398 - protein, 567 aa, Yarrowia lipolytica
YATKAHTLNKFSKIITEPKSQGASQAMLYACGFNEADLGKPQVGVASVWWSGNPCNMHLLDLNFKVKEGIEKHNLKAMQFNTIGVSDGISMGTKGMRYSLQSRDMIADSIETLMMAQHYDANISIPGCDKNMPGVLMAMGRVNRPSIMLYGGTIHPGKAETRKGEDIDIVSAFQAYGQYIAGGISETERADVIRHACPGQGACGGMYTANTMASAAEVLGMTLPGSSSAPAISKEKMAECEALGPAINKLLEMDLKPKDIMTRQAFENAIAYIIATGGSTNAVLHLLAIAHTVDVPLTIDDFQRISDNTPLLADFKPSGAHVMADLQKWGGTPAVIKMLIEQGFIDGSPMTCSGESLKDTVAKYPSLPKEQDIFASVDAPLKPSGHLQILKGSLAPGGSVGKITGKEGTFFKGTARCFDEEDLFIEALEKGEIKKGEKTCVIIRYEGPKGGPGMPEMLKPSSALMGYGLGKDVALLTDGRFSGGSHGFLIGHIVPEAYEGGPIGLVEDGDEIIIDADNNIIDLLVDEKTMAERKAKWTPPAPRYTSGTLHKYSKLVSDASTGCITDA

SEQ ID NO: 399 - DNA, 1752 bp, Candida glabrata
atgtcctccagactaacttttgctaggaagttctccagcacaagaaatgttgcaaagaaactgaataaatactcatatatcatcactgagcctaaggaccaaggtgcctctcaggctatgttgtatgccactggtttcaacaaggatgatttcagcaaagcgcaagttggtgttggttcttgttggtggtctggtaacccatgtaacatgcatctattggatttgaaccacagatgttcccaatccatcgagaaagccggtatgaaaggtatgcaatttaacacaattggtgtctctgacggtatctcgatgggtactaaaggtatgagatattctttacaaagtagagaaattatcgcagactctttcgagactatcatgatggcacaacactacgatgccaatattgctattccatcctgtgacaagaatatgcctggtgttatgatggctatgggtagacacaacagaccatctattatggtttatggtggtaccattatgccaggtcacccaacttgtggctccaagaacattccagagaacattgatgttgtctctgctttccaatcctacggtcaatacatctcgaagcaattcaatgaagaagagagaagtgatgttgtacaacactcttgtccaggtcctggctcttgtggtggtatgtacaccgccaacaccatggcctctgctgccgaagttttaggtatcactatgccaaactcttctgctttcccagctgtttctgctgaaaagattgctgaatgtgacaacattggtgctgctatcaagaacactatggaacttggtattaccccacgtcaaatcttcaccaaggaatcctttgaaaacgctatcacttacgtcattgctactggtggttccactaacgcagttcttcacttggtagctattgcacactctgctggtgtcaagatcaccccagatgatttccaaaggatcagtgacaagacaccattgctaggtgacttcaagccatctggtaagtatgtcatggccgatttgattaaggtcggtggtactcaaagtgtcatcaagttcttgtatgacaacggtttcttatacggtgacgccttaactgttactggtgaaactttggctgagcgtgccaagaaagccaagggtctaagtgaaactcaagacattattagaccattgtcaaacccaattaagccaagtggccatctacaaattctatacggttctcttgctccaggtggttctgttggtaagattactggtaaggaaggtacttacttcaaaggtaaggctcgtgttttcgaagaagaagacgctttcatctctgcattggagaatggtgaaatcaagaaaggtgaaaagacagttgttattatcagatatgaaggtccaaagggtggtccaggtatgccagaaatgttgaagccatctagtgcactaatgggttatggtctaggtaaagatgttgccttgctaactgatggtagattctctggtggttctcatggtttcttgattggtcacattgttccagaagctgccgaaggtggtccaattggtttggtcagagatggtgatgaaattgtgattgatgcagacaacaacaagattgacctcctaatctctgaatctgagatgtctcaacgtaaggccgaatggaaacctccagccccacgttacaacaggggtactctatccaaatatgctaagttagtctctaatgcctcccaaggttgtgttacagacgcttaa

SEQ ID NO: 400 - protein, 583 aa, Candida glabrata
MSSRLTFARKFSSTRNVAKKLNKYSYIITEPKDQGASQAMLYATGFNKDDFSKAQVGVGSCWWSGNPCNMHLLDLNHRCSQSIEKAGMKGMQFNTIGVSDGISMGTKGMRYSLQSREIIADSFETIMMAQHYDANIAIPSCDKNMPGVMMAMGRHNRPSIMVYGGTIMPGHPTCGSKNIPENIDVVSAFQSYGQYISKQFNEEERSDVVQHSCPGPGSCGGMYTANTMASAAEVLGITMPNSSAFPAVSAEKIAECDNIGAAIKNTMELGITPRQIFTKESFENAITYVIATGGSTNAVLHLVAIAHSAGVKITPDDFQRISDKTPLLGDFKPSGKYVMADLIKVGGTQSVIKFLYDNGFLYGDALTVTGETLAERAKKAKGLSETQDIIRPLSNPIKPSGHLQILYGSLAPGGSVGKITGKEGTYFKGKARVFEEEDAFISALENGEIKKGEKTVVIIRYEGPKGGPGMPEMLKPSSALMGYGLGKDVALLTDGRFSGGSHGFLIGHIVPEAAEGGPIGLVRDGDEIVIDADNNKIDLLISESEMSQRKAEWKPPAPRYNRGTLSKYAKLVSNASQGCVTDA

SEQ ID NO: 401 - DNA, 1815 bp, Chlamydomonas reinhardtii
atgtcgtcgactgcgaccatgcccggccagcgctcggccatgaaggccgctggcgcccagagccgccgtgccgtgaaggtgatggccgtgtccgctccggagaagccgtcgtcgtccgccccggccgtcccggcaggcctgaacaagttcagcagccgcatcacgcaacccaagtaccagggcgcgtctcaggccatgctgttcgctaccggtctgcgggaggaggacatgatcaagccgcaggtgggcatctcctcggtgtggtacgagggcaacccttgcaacatgcacctgatggacctggcggcggaggtgaagaagggcgtggaggccatgggcatggtgggcttccgcttcaacaccattggtgtcagcgacggcatttccatgggcaccgacggcatgagcttcagcctgcagagccgcgacctgattgccgactccattgagacggtcatgagcgcgcagtggtacgacgccaacatctcgctgcccggctgcgacaagaacatgcccggcacgctgatggccatggcccgcctgaaccgcccctcgctcatgatctacggcggcactatcaagcccggccacagccgcatggacggctccgtgctggacatcgtgtccgccttccagagctacggcgcctactcggccggcctgatcaacgaggcccagcgtgtggacattgtgcgcaacagctgccctggcgctggcgcgtgcggcggcatgtacactgccaacaccatggcctcggccattgaggctctgggcatgaccctgccctacagctcgtccatccccgctgaggacccgctgaagaaggacgagtgccgcatggccggccgctacatgctggagctgctcaagtccgacctgaagcctctggacatcatgacctacaaggcctttgagaacgccatggtgctggtcatggccaccggcggctccaccaacgccgtgctgcacttcatcgccatggcgcgcgcctgcggcgtgcccctgaccctggacgacttccagcgcgtgtctgaccgcacgcccttcatctgcgacctcaagccctcgggccgctacgtcatggaggacatccacaaggtgggcggcacccccgccgtgctgaagtacctggactccaagggctacatcaaccgcgactgcatgaccgtcactggcaagaccatgggcggcaacctggcggaggtgccggagctgcgtgcgggccaggacgtggtgctgcccgtggagaagcccatcaagcagactggccacatccagatcctgtacggcaacctggccccggagggcagcgtggccaagatcactggcaaggagggcctgctgttcgagggcgaggcgctggtgtttgacaacgaggaggacatgatcaccatggtgggcgccgagcccaacaagttccgcggcaaggtggtggtgatccgctacgagggccccaagggcggccccggcatgcccgagatgctcacgcccacctccgccatcatgggcgccggcctgggcaaggagtgcgcgctcatcaccgacggacgcttcagcggcggcagccacggcttcgtgatcggccacgtcacgcccgaggcgcaggtcggcggccccatcgccctggtcaagaacggcgacaagattgtgattgatgtggagaagcgcgtgatggacatgaagatctccgaccaggagctggccgcgcgcaaggctgcctggaaggcgcccccgctgaaggccaccagcggcaccctgtacaagtacatcaagaacgtgtcgtcggcgtccactggctgcgtcaccgactcgtaa

SEQ ID NO: 402 - protein, 604 aa, Chlamydomonas reinhardtii
MSSTATMPGQRSAMKAAGAQSRRAVKVMAVSAPEKPSSSAPAVPAGLNKFSSRITQPKYQGASQAMLFATGLREEDMIKPQVGISSVWYEGNPCNMHLMDLAAEVKKGVEAMGMVGFRFNTIGVSDGISMGTDGMSFSLQSRDLIADSIETVMSAQWYDANISLPGCDKNMPGTLMAMARLNRPSLMIYGGTIKPGHSRMDGSVLDIVSAFQSYGAYSAGLINEAQRVDIVRNSCPGAGACGGMYTANTMASAIEALGMTLPYSSSIPAEDPLKKDECRMAGRYMLELLKSDLKPLDIMTYKAFENAMVLVMATGGSTNAVLHFIAMARACGVPLTLDDFQRVSDRTPFICDLKPSGRYVMEDIHKVGGTPAVLKYLDSKGYINRDCMTVTGKTMGGNLAEVPELRAGQDVVLPVEKPIKQTGHIQILYGNLAPEGSVAKITGKEGLLFEGEALVFDNEEDMITMVGAEPNKFRGKVVVIRYEGPKGGPGMPEMLTPTSAIMGAGLGKECALITDGRFSGGSHGFVIGHVTPEAQVGGPIALVKNGDKIVIDVEKRVMDMKISDQELAARKAAWKAPPLKATSGTLYKYIKNVSSASTGCVTDS

SEQ ID NO: 403 - DNA, 1704 bp, Ostreococcus lucimarinus
atgcccgacggcgacgcgagcgatttgaacaagtggtcgagaaagatcacgcaaccgaagagccaaggagcgtcgcaggcgatgctgtacgccacgggcctgacggaggccgatatgaacaaaccgcagatcggcgtgtcctcggtgtggtggcagggaaacccttgtaacaaacacttgctggacctggcgggtaaagtggcggaaggcgtcaaggcggcggatatggtgagctttcagtttaacaccgtgggggtgtcggacgggatttccatgggtacgccgggcatgtccttctcgttgcaatcgcgggatttgatcgcggatagcatcgagaccgtgatgggtggacagtggtacgacggaaatatttctctcccggggtgcgataagaacatgccgggtacgatcatggccatgggtcgattgaaccgcccgtcgctgatgatttacggcggtaccattcgccctggccactccgccgtggatggtggcacactcgatatcgtatccgcgttccaatcgtacggacagttcgttaccggcgctatcacggaggaacagcgcaaagacatcgtgcgtaactcttgcccgggctctggcgcgtgcggcggcatgtacaccgccaacaccatggccagctgcatcgaggctctcggcatgactcttccgtattcttcctccattcccgcggaagatcctctcaagatggatgaatgtttcatggctggcgctgcgatgaagcatttgctcgaaatcgacctgaagccgcgtgacatcatgactcgcgcggcgttcgaaaacgccatggtcaccgtcatcgctctcggcggttccaccaacgcggttcttcacttgatcgcgatggcgcactctgtcggcatcaaattgactctggacgacttccaagccgtctccaacaagacgccgttcatcgctgacttaaagccgtccggtaagtacgtcatggaggacgtccacaaggttggcggcactccggcggtgttgaagtatttgatgtctgaaggcatgattgacggttcttgcatgactgtcaccggtaagaccctcgccgagaacctcgccatctgcccggatttgacgccggggcaagatgttattctcccggtgagcacgcccatcaagaagactggtcacttgcaatgcttgtacggcaacatcgcccagggaggctccgtggcgaagatcaccggtaaggaaggcttgtactttaaaggcttcgcgaagtgctacgatagcgaagaggaaatgctcgaggccttggcggcagactccgagtctttcaagggtagcgtcatcgtcattcgctacgaaggtccgaagggtggtccgggcatgccggagatgctcacgccgacgtcggccatcatgggtgccggtctcgggaacgactgcgcgctcatcacggatggtcgattctccggtggctcgcacggtttcgtcatcggtcacgttacgccggaagcgcaagttggtggtaacatcggtttgatcaaggacggtgatatcatcgaaattgatgccgaagttcgcaccatcaacgcgccggatgtcaccgacgccgagtgggaaaagcgtcgagcggcgtggaaggcgccgcctttggaagcgacgtcgggtacgctctacaagtactgcaagctcgtcgccagcgcttcggaaggctgcatcacggacttgtga

SEQ ID NO: 404 - protein, 567 aa, Ostreococcus lucimarinus
MPDGDASDLNKWSRKITQPKSQGASQAMLYATGLTEADMNKPQIGVSSVWWQGNPCNKHLLDLAGKVAEGVKAADMVSFQFNTVGVSDGISMGTPGMSFSLQSRDLIADSIETVMGGQWYDGNISLPGCDKNMPGTIMAMGRLNRPSLMIYGGTIRPGHSAVDGGTLDIVSAFQSYGQFVTGAITEEQRKDIVRNSCPGSGACGGMYTANTMASCIEALGMTLPYSSSIPAEDPLKMDECFMAGAAMKHLLEIDLKPRDIMTRAAFENAMVTVIALGGSTNAVLHLIAMAHSVGIKLTLDDFQAVSNKTPFIADLKPSGKYVMEDVHKVGGTPAVLKYLMSEGMIDGSCMTVTGKTLAENLAICPDLTPGQDVILPVSTPIKKTGHLQCLYGNIAQGGSVAKITGKEGLYFKGFAKCYDSEEEMLEALAADSESFKGSVIVIRYEGPKGGPGMPEMLTPTSAIMGAGLGNDCALITDGRFSGGSHGFVIGHVTPEAQVGGNIGLIKDGDIIEIDAEVRTINAPDVTDAEWEKRRAAWKAPPLEATSGTLYKYCKLVASASEGCITDL

SEQ ID NO: 405 - DNA, 1695 bp, Vitis vinifera
atgcaagcagctctgataaccccttctcctcgcgccattcccaccggttccatcactgccacgagaaccacaattccccctcatgtgcgcctcgtgtctgtccgagcatcgaccgaggtagcccaatcgccgccacccgcagtgaaagagacggcccacaagctcaacaagtacagctctcatgtcaccgagcccaagtcccagggcggctcacaagccatcctctatggcgtgggtctctcggatgaggacatgcacaagcctcaaatcggtatatcatcggtttggtacgagggcaacacctgcaacatgcatttgttgaagctttcagaggctgtgaaggagggggtgagagatgccggcatggttgggttcaggttcaacactgttggtgtcagcgatgccatctcaatgggcacgagaggcatgtgctatagcttgcagtctagggatttgattgctgatagtattgagacggtcatgtctgctcagtggtatgatggcaacatttctattcccggttgtgacaaaaatatgccaggtacaataatggcaatgggacggctcaatcgacctagtattatggtttatggtggagctatcaagcctggtcattttcaaggccatacttacgacataatatctgcctttcaggtttatggagagttcgtcagtgggtccataactgatgaacagaggatgaatgttgtccgaaattcatgcccaggagcaggagcttgtggtggaatgtatacagccaatacgatggcttctgctattgaagttatgggaatgtctcttcccttcagctcttcaacaccggctgaagacccattgaagttgcatgagtgccatttggctggaaaatatcttctggatttgataaaaatggacttaaaaccacgagatattatcactatgaagtcactacggaatgctatggttgttgtcatggcattgggtggatctaccaatgctgtattacatttaattgccattgcaaggtctgttggtctgcagttaactcttgatgattttcagaaagtaagtgatgaggttccattccttgctgatcttaagcccagtggcaaatacgtcatggaggacatacacaagattggaggaacaccggcaatcattcgcttccttttggaaaatgggtttttagatggggattgtataacagttactgggaagacattggctgaaaatgcagaactttttccttctttgcccagagatcagcaaataataagaccgttggcaaaccccataaagaagactggacacctccaaactttatatggaaatcttgcaccagagggttctgttgcaaaaattactggaaaagaagggctatatttctctggtcctgcacttgtctttgaaggtgaggaagctatgattgcagctatagcagagaatcctatgagctttaaggggaaagtagttattattagaggagagggacccaagggggggccaggaatgcctgaaatgttgactccaacaagcgcaataatgggagcaggtcttgggaaggatgttgctttgttgactgatggtaggttttcaggaggttcacatggatatgttgttggccacatatgtcctgaagcacatgtacattttcttttccttcatccagttttatttttttatttttttgatcagaaacgaagaagattatattaa

SEQ ID NO: 406 - protein, 564 aa, Vitis vinifera
MQAALITPSPRAIPTGSITATRTTIPPHVRLVSVRASTEVAQSPPPAVKETAHKLNKYSSHVTEPKSQGGSQAILYGVGLSDEDMHKPQIGISSVWYEGNTCNMHLLKLSEAVKEGVRDAGMVGFRFNTVGVSDAISMGTRGMCYSLQSRDLIADSIETVMSAQWYDGNISIPGCDKNMPGTIMAMGRLNRPSIMVYGGAIKPGHFQGHTYDIISAFQVYGEFVSGSITDEQRMNVVRNSCPGAGACGGMYTANTMASAIEVMGMSLPFSSSTPAEDPLKLHECHLAGKYLLDLIKMDLKPRDIITMKSLRNAMVVVMALGGSTNAVLHLIAIARSVGLQLTLDDFQKVSDEVPFLADLKPSGKYVMEDIHKIGGTPAIIRFLLENGFLDGDCITVTGKTLAENAELFPSLPRDQQIIRPLANPIKKTGHLQTLYGNLAPEGSVAKITGKEGLYFSGPALVFEGEEAMIAAIAENPMSFKGKVVIIRGEGPKGGPGMPEMLTPTSAIMGAGLGKDVALLTDGRFSGGSHGYVVGHICPEAHVHFLFLHPVLFFYFFDQKRRRLY

SEQ ID NO: 407 - DNA, 1839 bp, Vitis vinifera
atgcaagtagctctgataaccccttctcctcgcgccattcccaccggttccatcactgccacgagaaccacaattccccctcatgtgcgcctcgtgtctgtccgagcatcgaccgaggtagcccaatcgccgccacccgcagtgaaagagacggcccacaagctcaacaagtacagctctcatgtcaccgagcccaagtcccagggcggctcacaagccatcctctatggcgtgggtctctcggatgaggacatgcacaagcctcaaatcggtatatcatcggtttggtacgagggcaacacctgcaacatgcatttgttgaagctttcagaggctgtgaaggagggggtgagagatgccggcatggttgggttcaggttcaacactgttggtgtcagcgatgccatctcaatgggcacgagaggcatgtgctatagcttgcagtctagggatttgattgctgatagtattgagacggtcatgtctgctcagtggtatgatggcaacatttctattcccggttgtgacaaaaatatgccaggtacaataatggcaatgggacggctcaatcggcctagtattatggtttatggtggagctatcaagaggcagattgacaattataattgggatcccaatcataccatcctgtgtagtgtggcacaccactttatactgagatatgaaatgttgtatgaagtcatctttgagaaatggcatgatcctggtcattttcaaggccatacttacgacataatatctgcctttcagctatggtctgaaggaggtgtatgtgtagtatcacttgtcccatggtttatggagagttcgtccagtgggtccataactgatgaacagaggatgaatgttgtccgaaattcatgcccaggagcaggagcttgtggtggaatgtatacagccaatacgatggcttctgctattgaagttatgggaatgtctcttcccttcagctcttcaacaccggctgaagacccattgaagttgcatgagtgccatttggctggaaaatatcttctggatttgataaaaatggacttaaaaccacgagatattatcactatgaagtcactacggaatgctatggttgttgtcatggcattgggtggatctaccaatgctgtattacatttaattgccattgcaagaattgctcatgataagattcttggcaggtctgttggtctgcagttaactcttgatgattttcagaaagtaagtgatgaggttccattccttgctgatcttaagcccagtggcaaatatgtcatggaggacatacacaagattggaggaacaccggcaatcattcgcttccttttggaaaatgggtttttagatggggattgtataacaggtcctgcacttgtctttgaaggtgaggaagctatgattgcagctatagcagagaatcctatgagctttaaggggaaagtagttattattagaggagagggacccaaggggggcccaggaatgcccgaaatgttgactccaacaagcgcaataatgggagcaggtcttgggaaggatgttgctttgttgactgatggtaggttttcaggaggttcacatggatatgttgttggccacatatgtcctgaagcacatgaaggtggtcccattggtctcattgaaaatggagatatcatcacaattgatgtccaaaaaaggagaatggatgtccagctgacagatgaagagatgaatgagcgaagaaagaaatggagtcccccaccatataaggctaaccaaggagttctatacaagtacatcaagaacgtaaaatcggcttcagatgggtgtgtgacggatgaataa

SEQ ID NO: 408 - protein, 612 aa, Vitis vinifera
MQVALITPSPRAIPTGSITATRTTIPPHVRLVSVRASTEVAQSPPPAVKETAHKLNKYSSHVTEPKSQGGSQAILYGVGLSDEDMHKPQIGISSVWYEGNTCNMHLLKLSEAVKEGVRDAGMVGFRFNTVGVSDAISMGTRGMCYSLQSRDLIADSIETVMSAQWYDGNISIPGCDKNMPGTIMAMGRLNRPSIMVYGGAIKRQIDNYNWDPNHTILCSVAHHFILRYEMLYEVIFEKWHDPGHFQGHTYDIISAFQLWSEGGVCVVSLVPWFMESSSSGSITDEQRMNVVRNSCPGAGACGGMYTANTMASAIEVMGMSLPFSSSTPAEDPLKLHECHLAGKYLLDLIKMDLKPRDIITMKSLRNAMVVVMALGGSTNAVLHLIAIARIAHDKILGRSVGLQLTLDDFQKVSDEVPFLADLKPSGKYVMEDIHKIGGTPAIIRFLLENGFLDGDCITGPALVFEGEEAMIAAIAENPMSFKGKVVIIRGEGPKGGPGMPEMLTPTSAIMGAGLGKDVALLTDGRFSGGSHGYVVGHICPEAHEGGPIGLIENGDIITIDVQKRRMDVQLTDEEMNERRKKWSPPPYKANQGVLYKYIKNVKSASDGCVTDE

SEQ ID NO: 409 - DNA, 1827 bp, Arabidopsis thaliana
atgcaagccaccatcttctctccacgcgccactctcttcccctgtaaacctctcctcccttcccacaatgtcaactctcgccgtccctcaatcatctcctgctccgcccaatccgtaaccgctgatccttcaccacctatcactgacaccaataagctcaacaaatacagctcaagaatcactgaacccaaatcccaaggtgggtctcaagcaattcttcacggtgttggtttatcagacgacgatttgctaaaaccccagattggtatctcgtcggtttggtatgaagggaacacttgtaacatgcatttgctgaaattgtctgaggctgtgaaagaaggagttgaaaatgcaggaatggttgggtttaggtttaatactattggtgtgagtgatgctatttcgatgggaacgagagggatgtgttttagtttgcaatctagggatttgattgctgatagtattgagactgttatgagtgctcagtggtatgatggtaacatatctattcccggttgtgataaaaatatgcctggaactattatggctatgggaaggcttaacagaccagggattatggtttatggtggaaccattaagcctggccattttcaagacaagacatatgacattgtatctgctttccagagttatggagaatttgttagtggctccataagtgatgaacagagaaagactgtcctccatcattcatgtcctggagctggagcctgtggtggcatgtacacagcgaatacaatggcttctgctatcgaagcaatgggaatgtcccttccttacagttcttcaatacctgctgaagacccattgaagttggacgagtgtcgcttagcaggaaaatatcttctagaattgctaaagatggacttaaaaccccgtgacattatcactccaaaatcacttcgtaatgcaatggtttccgtcatggcccttgggggatcgacaaatgcagtattgcatctaattgctattgcaaggtctgttggtttggagttgactcttgacgattttcagaaagttagcgatgcggttccatttctagcagatcttaaacccagtgggaagtatgttatggaggatatacataagataggtggtacgccagctgttctccgctatttattagagctaggattgatggatggtgattgtatgacagtgacagggcagactttggctcaaaatttagaaaacgtcccaagcttaacagaagggcaggagataattagacctctgtcaaatccaatcaaggagactggacacatacaaattttgagaggagaccttgcaccagatggttctgtagcaaaaattaccggcaaagagggcttatatttctctggtcctgcacttgtatttgaaggagaggaatctatgttggctgctatatcagcagacccaatgagttttaagggaactgtggttgttatcagaggagaggggcctaaaggaggtccaggtatgcctgagatgttgacaccgacaagtgcaataatgggtgccggtcttggaaaggaatgtgcattactgactgatggtaggttctctggtgggtcacacggttttgttgttggccacatttgccctgaagctcaggagggtggtccgatcggtctgatcaagaacggagacataatcaccattgacataggaaagaagagaatagacacacaagtctcacccgaagaaatgaatgaccgtagaaagaaatggactgctcctgcatacaaggttaaccgcggagtcctatataagtacatcaagaacgtgcaatcggcttcagatggatgtgtgactgacgagtaa

SEQ ID NO: 410 - protein, 608 aa, Arabidopsis thaliana
MQATIFSPRATLFPCKPLLPSHNVNSRRPSIISCSAQSVTADPSPPITDTNKLNKYSSRITEPKSQGGSQAILHGVGLSDDDLLKPQIGISSVWYEGNTCNMHLLKLSEAVKEGVENAGMVGFRFNTIGVSDAISMGTRGMCFSLQSRDLIADSIETVMSAQWYDGNISIPGCDKNMPGTIMAMGRLNRPGIMVYGGTIKPGHFQDKTYDIVSAFQSYGEFVSGSISDEQRKTVLHHSCPGAGACGGMYTANTMASAIEAMGMSLPYSSSIPAEDPLKLDECRLAGKYLLELLKMDLKPRDIITPKSLRNAMVSVMALGGSTNAVLHLIAIARSVGLELTLDDFQKVSDAVPFLADLKPSGKYVMEDIHKIGGTPAVLRYLLELGLMDGDCMTVTGQTLAQNLENVPSLTEGQEIIRPLSNPIKETGHIQILRGDLAPDGSVAKITGKEGLYFSGPALVFEGEESMLAAISADPMSFKGTVVVIRGEGPKGGPGMPEMLTPTSAIMGAGLGKECALLTDGRFSGGSHGFVVGHICPEAQEGGPIGLIKNGDIITIDIGKKRIDTQVSPEEMNDRRKKWTAPAYKVNRGVLYKYIKNVQSASDGCVTDE

SEQ ID NO: 411 - DNA, 1785 bp, Oryza sativa
atgcagtcgcttgccctcacctccccctcccttccggcgccggcgaccgcatccggccgccgccgccgccgcctggagcgcatccgcgccaccgcggtgtccgacgagccgaagctgaacaagtacagcgcgcgcatcacggagcccaagtcgcagggggcgtcgcaggcggtgctctacggcgtggggctcaccgacgccgacctccgcaagccgcaggtgggcgtctcctctgtctggtacgagggcaacacctgcaacatgcaccttctccgcctcgccgaggccgtcagggacggcgtccgcgaggccggcatggtggccttccgcttcaacaccgtcggggtcagcgacgccatctccatgggcacccggggcatgtgctacagcctccagtcgcgcgacctcatcgccgacagcatcgagaccgtcatgggcgcgcagcactacgacgccaacatctccattcctggatgcgacaagaacatgccaggaacaataatggcaatggggcggctgaaccgaccaagtatcatgatatatggtggaactattaagcctggtcattttcagggtaattcttatgacatagtatctgctttccagtgctatggagaatttgttaccggatcaatcagtgatgagcaaagaaagaatgtgctccgcaactcatgcccaggagcaggtgcgtgtggtggtatgtacaccgcgaacacaatggcatccgccatcgagaccatgggtatgagccttccgtacagttcttcaacccctgctgaagacccactaaagctagaggaatgccgtcttgctgggaagtatcttttagaattgttaaagatggatttgaagcctgaagacattatcactgagaaatctttgcggaacgcaatggtcattgtcatggcacttggtgggtctactaatgctgttttgcatttaattgctatcgctaggtctgtaggtctgcaattaactcttgatgattttcagaaggtcagtgaccaagttcctttccttgcggaccttaagcctagtggcaaatatgtcatggaggatctgcataagattggtggaacacctgcagtaattcattatcttctggagcaaggtcttcttgatggtgattgtatgaccgtcactgggaaaactctagcggaaaatgctaaaatcttccctcctctgtccgaaggacagcaaataataaggcccctggacaacccaatcaaatcaactggtcatatacaaatactttatggcaatcttgcaccagaaggttctgtagcaaaaattactggcaaagaggggatgtttttctcaggccctgcactagtgtttgagggtgaagaatctatgattacagctatatcagaaaacccagcgaatttcaaggggaaggtagtagtgatacgaggagaaggaccgaaaggtggaccagggatgcctgaaatgctgactccaactagtgcaataatgggtgctggtcttgggaaggagtgtgccctgctgaccgatggcagattttctggaggatcacatggatttgttgtaggccacatttgtcctgaagcacaggagggaggtccaattggtcttgttcaaaacggtgacaaaattaccattgatgttgtgaagagagtaattgatgttgaactgactgaagctgagctggaagaaagacggaggaaatggacgccgccgccacacaaggctgcccgtggagcgctttggaagtacacgaagctcgtgtcccctgcatcaagaggatgcgtcaccgatgagtag

SEQ ID NO: 412 - protein, 594 aa, Oryza sativa
MQSLALTSPSLPAPATASGRRRRRLERIRATAVSDEPKLNKYSARITEPKSQGASQAVLYGVGLTDADLRKPQVGVSSVWYEGNTCNMHLLRLAEAVRDGVREAGMVAFRFNTVGVSDAISMGTRGMCYSLQSRDLIADSIETVMGAQHYDANISIPGCDKNMPGTIMAMGRLNRPSIMIYGGTIKPGHFQGNSYDIVSAFQCYGEFVTGSISDEQRKNVLRNSCPGAGACGGMYTANTMASAIETMGMSLPYSSSTPAEDPLKLEECRLAGKYLLELLKMDLKPEDIITEKSLRNAMVIVMALGGSTNAVLHLIAIARSVGLQLTLDDFQKVSDQVPFLADLKPSGKYVMEDLHKIGGTPAVIHYLLEQGLLDGDCMTVTGKTLAENAKIFPPLSEGQQIIRPLDNPIKSTGHIQILYGNLAPEGSVAKITGKEGMFFSGPALVFEGEESMITAISENPANFKGKVVVIRGEGPKGGPGMPEMLTPTSAIMGAGLGKECALLTDGRFSGGSHGFVVGHICPEAQEGGPIGLVQNGDKITIDVVKRVIDVELTEAELEERRRKWTPPPHKAARGALWKYTKLVSPASRGCVTDE

SEQ ID NO: 413 - DNA, 1767 bp, Physcomitrella patens
atggtggtggcgtcgtcgagcgcggaaggggctgtggccgcgccgcccccgcagtccgtggaggcgccggctgggagcgccacggacagcgcgaagctgaacaagtactcaagccgcgtgacccagcctaaggcgcagggcgcctcgcaggcgattctgtacggggtggggttgtccgaggaggatatgaacaagccgcaggtgggaatctcgtcggtttggtacgagggcaacacgtgcaatatgcatttgctgcatttgtctgaggctgtgaaggagggggtgaaggaggccgggatggtggggttccgattcaacactgtgggagttagtgacgccgtgtccatgggaaccgaggggatgtgctacagcctgcagtcgcgcgatttgattgcggacagtgtggagactgttatgggcgggcagtggtacgacgccaacatttccattccggggtgtgataagaacatgcccggggtggtcatggccatggggcggctgaacaggcccagcattatgatttatgggggcaccatcaagccaggtcattttaacggacagacgctcgacatcgtttcagccttccagagctacggagagtatgtgagcgggtccatctccgaggatgagaggatggacgttgtaaggaattcttgccccggattcggagcttgtggaggaatgtacaccgccaacaccatggcgtccgccattgaagcgctaggcatgtcgctgccgtacagctcttccatccccgccgaggacccgttgaagatcgaggaatgcaaattggccgggaaatacattctggagcttctaaagcgtgacttgaagccgcgtgacattatcacccgaaagtcgctcaacaacgctatggtggttgtcatggcgctcggaggttccacgaatgcggtgcttcatctcatcgccatcgctcgttctgtgggcgttgagctcacattggacgatttccaggacgtgagcgacaagaccccgttcattgctgatcttaaacctagcgggaagtacgtgatggaggatttgcacaaaattggaggcgtgcctgccgtactgaagtacttgttagaaaaagggctaatcgacgggagctgcatgacagtcacggggaagaccatcgctgagaacctcgctgagtgcccgcccctctccgaaggtcagaagatcatcatgcctctcgaaaaccccatcaaaaaaactggtcacttgcaaattctgtggggcaaccttgctccagagggttccgttgctaaaattacaggcaaagaaggcttgtacttttctggccccgcccgtgtatttgagggagaggaagccatgctggacgctatcactgaggaccctcagagcttgaagggtactgtgatcgttatccgaggggagggtcctaagggtggcccgggcatgcctgagatgctcacccccacgagtgctgtaattggagctggacttggcaaggaagtagcgcttctgaccgacggtcgattctctggtggctctcacggcttcgttgttgggcacatctgcccagaagctcaagtaggtggcccgattgggcttgtacgtgatggagacgtgatcaccatcgacgtggagaagaggaaaatcaacgtcgatttgacggcacaagagcttgcggatcgaaaactcctgtggagagctcccccttacaaggcctctcgtggaaccctttacaagtacatcaagaatgtcaaatcagcgtccgaaggttgcgtgactgatgagtga

SEQ ID NO: 414 - protein, 588 aa, Physcomitrella patens
MVVASSSAEGAVAAPPPQSVEAPAGSATDSAKLNKYSSRVTQPKAQGASQAILYGVGLSEEDMNKPQVGISSVWYEGNTCNMHLLHLSEAVKEGVKEAGMVGFRFNTVGVSDAVSMGTEGMCYSLQSRDLIADSVETVMGGQWYDANISIPGCDKNMPGVVMAMGRLNRPSIMIYGGTIKPGHFNGQTLDIVSAFQSYGEYVSGSISEDERMDVVRNSCPGFGACGGMYTANTMASAIEALGMSLPYSSSIPAEDPLKIEECKLAGKYILELLKRDLKPRDIITRKSLNNAMVVVMALGGSTNAVLHLIAIARSVGVELTLDDFQDVSDKTPFIADLKPSGKYVMEDLHKIGGVPAVLKYLLEKGLIDGSCMTVTGKTIAENLAECPPLSEGQKIIMPLENPIKKTGHLQILWGNLAPEGSVAKITGKEGLYFSGPARVFEGEEAMLDAITEDPQSLKGTVIVIRGEGPKGGPGMPEMLTPTSAVIGAGLGKEVALLTDGRFSGGSHGFVVGHICPEAQVGGPIGLVRDGDVITIDVEKRKINVDLTAQELADRKLLWRAPPYKASRGTLYKYIKNVKSASEGCVTDE

SEQ ID NO: 415 - DNA, 1800 bp, Chaetomium globosum
atgctctctccgtctctgctgcgcactggcgctcccagggccctggccatgagccgggtcttgccttttaggaaccagtaccgtctcctatccacaacaccccgccggtatgccgacgagaagctcaaccggatttcctccaagatcacacaaccgaagtcgcagggtgcctcccaggctatgctctacggtaccggcttgaccgaggcagacatgtccaaggcccaggtcggcatctcgtccgtctggtacgagggcaacccctgcaacatgcacctgatggagctctctggccatgtccgcaacagcatcgaaaaggccgggctcgtccctatgcgcttcaacaccatcggtgtttctgacggcatcagcatgggcaccacgggcatgcgctacagcttgcagagcagagagatcatcgccgacagcatcgagacggtcatgcagggccagtggtacgacgccaacgtgtcgctgcccggctgcgacaagaacatgcctggtgtcctgatcgccatgggccgcgtcaacaggcctagcattatggtctacggtggcaccatcaagccgggctgcaccatgaagggcgagcccatcgacatcgtcagcgccttccaggcgtacggccagtacatctcgggcgagatcgacgagaagcagcgcttcgacatcatccgcaacgcctgccctggcggcggcgcctgcggtggcatgtacacggccaacaccatggcctcggcgatcgagaccctcggcatgaccctccctggcagcagcagcttcccggccgaggacgcgcgcaagaaggccgagtgcgagagcgtgggcgaggccatcaagaacctcctccgcgagaacatccggcctagcgacatcctgacccgacaggcgtttgagaacgccatggtcgtcgtcggcgtgctgggcggcagcaccaacgctgtgctgcacctcatcgccatcgccgactcggtcggcatcaagctcactatcgacgacttccaagccgtctcggaccgtatccctttactcgccgatctgaagccctcaggcaagtacgttatggaggacctgttcaagatcggcggcaccccggcgctgctcaagttcctcctcaaggagggcctcctcgacggctcgggcattaccgtgactggtaagaccatgaaggagaacgtcgccgacctgcccggcttccccgcggaccagcccatcatccgccccctaaacaacccgctcaagccgacgggccacatccagatcctgcgcggctcgctcgcccccggcgggtcggtgggcaagatcacgggcaaggagggcctccggttcgagggcacggccaaggtgtacgactacgaggatgccttcatcgaggcgctggagcggggcgagatcaagaagggcgagaagacggtggtggtgatccggtacgagggccccaagggcgggcccggcatgcccgagatgctcaagcccagctcggccatcatgggcgccgggctcggccaggacgtcgccctcatcaccgacggccgcttctccggcggcagccacggcttcctcatcggccacatcgtgcccgaggccatggaaggcgggcccatcggcctagtccgcgacggcgacaagattgtcatcgacgccgacaagcgcgtcctcgacctcgaggtgcccgccgacgaaatggcgcgccgcaaggccgagtggaaggcccccgagcccagggccaagcgcggtaccctgaagaaatacgcctcgctggtcagcgatgccagccaggggtgtgtcaccgacaaatag

SEQ ID NO: 416 - protein, 599 aa, Chaetomium globosum
MLSPSLLRTGAPRALAMSRVLPFRNQYRLLSTTPRRYADEKLNRISSKITQPKSQGASQAMLYGTGLTEADMSKAQVGISSVWYEGNPCNMHLMELSGHVRNSIEKAGLVPMRFNTIGVSDGISMGTTGMRYSLQSREIIADSIETVMQGQWYDANVSLPGCDKNMPGVLIAMGRVNRPSIMVYGGTIKPGCTMKGEPIDIVSAFQAYGQYISGEIDEKQRFDIIRNACPGGGACGGMYTANTMASAIETLGMTLPGSSSFPAEDARKKAECESVGEAIKNLLRENIRPSDILTRQAFENAMVVVGVLGGSTNAVLHLIAIADSVGIKLTIDDFQAVSDRIPLLADLKPSGKYVMEDLFKIGGTPALLKFLLKEGLLDGSGITVTGKTMKENVADLPGFPADQPIIRPLNNPLKPTGHIQILRGSLAPGGSVGKITGKEGLRFEGTAKVYDYEDAFIEALERGEIKKGEKTVVVIRYEGPKGGPGMPEMLKPSSAIMGAGLGQDVALITDGRFSGGSHGFLIGHIVPEAMEGGPIGLVRDGDKIVIDADKRVLDLEVPADEMARRKAEWKAPEPRAKRGTLKKYASLVSDASQGCVTDK

SEQ ID NO: 417 - DNA, 1791 bp, Neurospora crassa
atgctcgctccctcccttctgcgggctcaggcccccagagctctggcttctgcccgtctctccctccgctccctctccaccactccccgccgctacaatgcccaggagaagcagctcaacaaggtgtcggccaacatcacccagcccaagtctcagggtgcttcccaggccatgctctacgccaccggcctcaacgaggacgacatgaacaaggcccaggtcggtatctcgtctgtctggtatgagggcaacccttgcaacatgcaccttctcgacctctccggcctcgtcaaggagtccgttgccaaggctggcctcgtccccatgcgcttcaacaccatcggtgtctcggacggtatctccatgggtaccaccggtatgcgctacagcttgcagtcccgtgagattattgccgactccatcgagaccgtcatgaacggccagtggtacgacgccaacatctccctccccggttgcgacaagaacatgcccggtgtcctcatcgccatgggccgtgtcaaccgcccctccatcatggtctacggtggtaccatcaagcccggctgcaacatgaagggcgagaacatcgatatcgtttccgccttccaggcatacggccagtacatctccggtgagatcgacgagaagcagcgcttcgatatcatccgcaacgcctgccctggtggtggcgcctgcggtggcatgtacactgccaacaccatggccaccgccatcgagaccctcggcatgacccttcccggttcctcctcctaccccgccgagtctcccgagaagaagaacgagtgcttgagcgtcggtgaggccatcaagaacctcctccgcgaggacatccgccccaccgatatccttactcgccaggccttcgagaacgccatgatcgtcgtcaacattcttggcggttccaccaacgccgtcctccacttgattgccatcgccgactccgttggcatcaagctcaccatcgatgacttccaggccgtctccgaccgcactcctttccttgccgacctcaagccttccggcaagtgggtcatggaggaccttagcaagattggcggcacccccgcccttctcaaattcctcctcaaggagggaatcctcgacggctccggcatcacctcgaccggtaagaccatgaaggagaacgtcgagaagttccccgacttccccaccgaccaggccatcatccgccctctgtcgaaccccatcaaggaaaccggacacattcagatcctccgcggctctctcgctcccggcggttccgtcggcaagatcaccggcaaggagggtctccgtttcgagggtaaggctcgctgcttcgactacgaggacggctttattgaggctctcgagcgtggcgagatcaagaagggcgagaagaccgtcgtcgtcatccgctacgagggtcccaagggcggccctggcatgcccgaaatgctcaagccttcgtccgccattatgggctacggtctcggcaaggacgttgccctcatcactgacggccgcttctccggtggttctcacggcttcctcatcggccacattgtgcctgaggctatggagggtggccccattggtctcgtccgcgatggcgacaccatcgtcatcgacgccgagaagaaggttcttgaccttgaggttcctgaggaggagctcgccaagcgccgcaaggagtggaaggctcctgagcccaaggctaagcgtggtactctcaggaagtacgcccagctcgtcaaggatgctagctctggctgcgtcactgacgcttaa

SEQ ID NO: 418 - protein, 596 aa, Neurospora crassa
MLAPSLLRAQAPRALASARLSLRSLSTTPRRYNAQEKQLNKVSANITQPKSQGASQAMLYATGLNEDDMNKAQVGISSVWYEGNPCNMHLLDLSGLVKESVAKAGLVPMRFNTIGVSDGISMGTTGMRYSLQSREIIADSIETVMNGQWYDANISLPGCDKNMPGVLIAMGRVNRPSIMVYGGTIKPGCNMKGENIDIVSAFQAYGQYISGEIDEKQRFDIIRNACPGGGACGGMYTANTMATAIETLGMTLPGSSSYPAESPEKKNECLSVGEAIKNLLREDIRPTDILTRQAFENAMIVVNILGGSTNAVLHLIAIADSVGIKLTIDDFQAVSDRTPFLADLKPSGKWVMEDLSKIGGTPALLKFLLKEGILDGSGITSTGKTMKENVEKFPDFPTDQAIIRPLSNPIKETGHIQILRGSLAPGGSVGKITGKEGLRFEGKARCFDYEDGFIEALERGEIKKGEKTVVVIRYEGPKGGPGMPEMLKPSSAIMGYGLGKDVALITDGRFSGGSHGFLIGHIVPEAMEGGPIGLVRDGDTIVIDAEKKVLDLEVPEEELAKRRKEWKAPEPKAKRGTLRKYAQLVKDASSGCVTDA

SEQ ID NO: 419 - DNA, 1788 bp, Magnaporthe grisea
atgatgtcctcaaacctgctgcgcgccagggtgcccaaggccctggctgccaccaggagccatgcggccctcttctccacaacctcgcgccgcgctgagcaactgaacaagacttcggccaagatcacacagcccaagtcccagggtgcgtcacaggccatgctgtacgccaccggcttgaccgaggaggacatgaacaagccgcaggtcggcatctcgtcggtctggtacgagggcaacccctgcaacatgcacatcctcaagctgtcggagcggatccgcgactccgtcaaggccgccaacctggtccccatgcgcttcaacaccattggagtctcggacggtatcagcatgggcacgaccggcatgcgctattcgctgcagagccgtgagatcatcgccgacagtatcgagaccgtcatgcagggccagtggtacgatgccaacatctccatcccgggctgcgacaagaacatgcccggtgttctcatcgccctcggccgtgtcaaccgccccagtttgatcgtttacggcggtaccatcaagcccggctgcagccaaaagggcgagcccatcgacatcgtcagcgccttccaggcctacggccagtacctgactggtgagatcaccgaggagcagcggttcgacatcatccggaacgcgtgccccggcggtggtgcatgcggtggcatgtacactgccaacactttggcgtcggctatcgagactctgggcatgagcttgccgggaagcagcagcaaccccgcagagcaccccagcaagctggccgaatgtgaccaggttggcgaggccatcaagaacatcctccgtgaggacgtgcgcccccgcgacatcatgacgaggcaggcctttgagaacgccatggttgtagtcagcatccttggtggaagcaccaacgccgtcctgcacctgcttgccgttgccgatgcggtcggtgtcaagcttaccattgacgacttccaagccgtttccgaccggacaccgctcctggcagacctcaagccttcgggcaaatacgtcatggaggatgtacacaagattggtggcacgccatctctcctgcgcttcctggccaaggagggcttgatcgatgcttctggcatcaccgtcactggcaagaccatgaaggagaacttggacaagtaccccgacttcccggccgaccagcccatcatccggcctctcagcaaccccctcaagtccacgggccacatccagatcctccgcggtagtctcgcacccggtggctctgtcggcaagattaccggcaaggagggtcttcagttcactggcaaggcccgctgctacgactgcgaggacgactttatcgagtcgctcgagcgtggcgagatcaagaagggtgagaagacggttgtcatcatccgttacgagggccccaagggtggtcccggcatgcccgagatgctgaagcccagctcggccatcatgggtgccggtctcggcaaggacgttgccctcatcactgacggtcgcttctctggcggttcgcacggattcctcatcggacacgttgtgcccgaggccatggagggcggacctatcgcacttgttcgcgatggcgacaccattactattgatgcggagaagcgggtgatcgacacggacgtgtcggacaagaccatggcggagcgccgcgccgagtggaaggctcccccgatcagggagaccaggggaacgctggccaagtacgcagcgctggttagcgacgcgagcagtggttgcgtgacggacaaggtcgcgcgataa

SEQ ID NO: 420 - protein, 595 aa, Magnaporthe grisea
MMSSNLLRARVPKALAATRSHAALFSTTSRRAEQLNKTSAKITQPKSQGASQAMLYATGLTEEDMNKPQVGISSVWYEGNPCNMHILKLSERIRDSVKAANLVPMRFNTIGVSDGISMGTTGMRYSLQSREIIADSIETVMQGQWYDANISIPGCDKNMPGVLIALGRVNRPSLIVYGGTIKPGCSQKGEPIDIVSAFQAYGQYLTGEITEEQRFDIIRNACPGGGACGGMYTANTLASAIETLGMSLPGSSSNPAEHPSKLAECDQVGEAIKNILREDVRPRDIMTRQAFENAMVVVSILGGSTNAVLHLLAVADAVGVKLTIDDFQAVSDRTPLLADLKPSGKYVMEDVHKIGGTPSLLRFLAKEGLIDASGITVTGKTMKENLDKYPDFPADQPIIRPLSNPLKSTGHIQILRGSLAPGGSVGKITGKEGLQFTGKARCYDCEDDFIESLERGEIKKGEKTVVIIRYEGPKGGPGMPEMLKPSSAIMGAGLGKDVALITDGRFSGGSHGFLIGHVVPEAMEGGPIALVRDGDTITIDAEKRVIDTDVSDKTMAERRAEWKAPPIRETRGTLAKYAALVSDASSGCVTDKVAR

SEQ ID NO: 421 - DNA, 1797 bp, Gibberella zeae
atgctttcccggtcactgctgcgctctagagctgtgggagctttccccctctctgccaggaatcatggccgcttcctgtctaccacctccatccgctccgatgacaagctcaacaagatctcctccaacatcactcagcccaaggcccagggtgcttcccaggctatgctctacgccaccggcctctctgaagctgacatgaacaaggctcaagttggcatctcgtccgtctggtacgagggaaacccttgcaacatgcaccttatggacctctctgcccacgtcaaggagtctgtcgccaaggccggtcttattccctaccgattcaacaccatcggtgtctctgatggtatctccatgggtaccactggtatgcgatattccctccagagccgagagattattgccgatagtgttgagactgtcatgaacggtcaatggtatgacgccaacgtcagcttgcccggttgcgacaagaacatgcccggtgttgccattgccatgggtcgtgtcaaccgtcccagcatcatggtttacggtggtaccattaagcccggttgcaccaagcagggcgagtctatcgatatcgtctctgctttccaggcctacggtcaatacatcaccggcgagatcaccgaggagcagcgattcgacattatccgaaatgcctgccctggtggtggtgcttgtggtggcatgtacactgccaacaccatggctactgccattgagactctgggacttaccctccctggtagcagcagcagccctgctgaggaccccagcaagatcgccgagtgtgaggctgttggacctgctatccgcaacattctcaaggaagatatccgacctcgtgacatcatgactcgccaagcctttgagaatgccatgatcgtcactaccatccttggtggcagcaccaacgctgttctgcatcttatcgcaattgccgactctgtcggtatcaagctcgacatcgaggacttccaaaaggtttccgaccgcactcccttccttgccgacctgaagccctctggaaagtgggtcatggccgatatgcacaagattggtggtactcctgctcttctcaagttcctcttgaaggagggtatcattgacggctctggtatcactgtcactggcaagaccatgaagcagaacgtcgaggagttgcctggattccccgaggatcaaaccatcattcgcccccttagcaaccccattaagcctaccggtcacatccagattctccgtggatccctggctcctggtggctgtgttggtaagatcactggcaaggagggtctccgattcgagggtaaggcccgtgtctacgactccgagcccgccttcatctctagccttgaggctggtgagatcaagaagggtgagaagactgtcgttatcatccgatatgatggacccaagggtggccccggtatgcctgagatgctgaagccttcttctgccattatgggtgctggccttggacaggatgtcgcccttctcactgacggtcgcttctctggtggttctcacggtttcattattggtcacattgtccccgaggcaatggagggtggccctatcgcccttgtcgaggacggtgacaccatcgttatcgacgccgagtctcgtgctatcgacctcgttgttcccgaggcagaggttgatcgccgtcgcaaggcctggaaggctcccgctccccgatacaccaagggcacactcagcaagtacgctcgactggtgaccaacgccagtgagggctgtgtcaccgatagcggtctcaagaactaa

SEQ ID NO: 422 - protein, 598 aa, Gibberella zeae
MLSRSLLRSRAVGAFPLSARNHGRFLSTTSIRSDDKLNKISSNITQPKAQGASQAMLYATGLSEADMNKAQVGISSVWYEGNPCNMHLMDLSAHVKESVAKAGLIPYRFNTIGVSDGISMGTTGMRYSLQSREIIADSVETVMNGQWYDANVSLPGCDKNMPGVAIAMGRVNRPSIMVYGGTIKPGCTKQGESIDIVSAFQAYGQYITGEITEEQRFDIIRNACPGGGACGGMYTANTMATAIETLGLTLPGSSSSPAEDPSKIAECEAVGPAIRNILKEDIRPRDIMTRQAFENAMIVTTILGGSTNAVLHLIAIADSVGIKLDIEDFQKVSDRTPFLADLKPSGKWVMADMHKIGGTPALLKFLLKEGIIDGSGITVTGKTMKQNVEELPGFPEDQTIIRPLSNPIKPTGHIQILRGSLAPGGCVGKITGKEGLRFEGKARVYDSEPAFISSLEAGEIKKGEKTVVIIRYDGPKGGPGMPEMLKPSSAIMGAGLGQDVALLTDGRFSGGSHGFIIGHIVPEAMEGGPIALVEDGDTIVIDAESRAIDLVVPEAEVDRRRKAWKAPAPRYTKGTLSKYARLVTNASEGCVTDSGLKN

SEQ ID NO: 423 - DNA, 1797 bp, Aspergillus niger
atgttcgcgtcgagtatccgatcgagagctctgggattgagcccacgagcccggtttgagaatactcgtcttccatcttccactagcgggcgccgttatagatccgatgagcccctcaaccgaatttcctcgaaaatcacacaacccaaatcccagggtgcttcgcaagcaatgctctacgccaccggcctaacagaggaagacatgtccaagccacaggtcggtatctcctcggtgtggttcgagggtaacccatgcaacatgcacttgcatgacctgtctgccattgtgcgcgattccgtgctccgtgcgggtctggtccctatgcgattcaactcagttggagtgtcggatgggatcagtatgggtacaaagggaatgagatacagcctgcagagccgggagctgatcgctgatggtattgagacggtgatgaatgcccagtggtacgatgcgaatgtgtcgctcccgggttgtgataagaatatgccaggtgtattaatagcgatgggacgcacgaaccgacctagcatcatggtctacggtggcagtatcaagcctggatgcagtgcaaagggccagaaattggacctggtcagtgcattccagtcatatggccagttcatcaccggccagatcgacgagaaggagcggttcgatatcattcgcaatgcatgccccggcagaggtgcatgcggtggcatgtacacggctaatacgctggccacggctattgagactatgggaatgactattcctggtagtagtagttgcccggcagatgatcgcaagaagctagttgagtgcgaaaatattggcgaggtggttaaaaatatgctcagggaagatatcaaacccagggatatcttaacacgtcaagccttcgagaatgcaatgattgtagtgaacgtgctgggtggcagtactaatgctgttttacatctgattgccattgctgactctgtcggtatcaagttgactattgatgacttccaggcagtatctgataagacaccgttcctggctgatttgaagccatctggaaagtatcttatgaatgatctttataatatcggtggcacaccagccctcctgaaatatctcctgaaggagggcttgatcgatggctcaggagttactgttaccggtaaaacaatgaaggaaaatgtagcctcatggcctgattttcctgctgaccaggatatcatccgccccctcaacaaccctatcaaaccatctggccatctccagattcttcgcggatcgctggccccgggcggttccgtgggtaagattactggaaaggagggtctgcggtttgagggtatagctaaatgctatgattacgaagatgcattcattgagtcccttgagcggggtgagatcaagaagggcgagaaaacagtcgtgattatccggtatgaaggccccaagggtggcccaggaatgcctgagatgctcaagcccagcgcggccattatgggcgctggacttggccaggacgttgctcttcttacagatggaagattctcgggtggcagtcacggatttttgatcggacatatcgtgccggaagccatggaaggcggcccgatcgcgttggctcgagacggtgatcggatcgtgattgatgctgaggaaagagtggtcgatctggatatctctactgaggagctcgagaagaggaggaaggagtggaacgcacccccgctccggtaccagaagggaactctgaagaaatattgcacgctggtcagcgacgccagccatggttgtgtcacggacggaccgatatag

SEQ ID NO: 424 - protein, 598 aa, Aspergillus niger
MFASSIRSRALGLSPRARFENTRLPSSTSGRRYRSDEPLNRISSKITQPKSQGASQAMLYATGLTEEDMSKPQVGISSVWFEGNPCNMHLHDLSAIVRDSVLRAGLVPMRFNSVGVSDGISMGTKGMRYSLQSRELIADGIETVMNAQWYDANVSLPGCDKNMPGVLIAMGRTNRPSIMVYGGSIKPGCSAKGQKLDLVSAFQSYGQFITGQIDEKERFDIIRNACPGRGACGGMYTANTLATAIETMGMTIPGSSSCPADDRKKLVECENIGEVVKNMLREDIKPRDILTRQAFENAMIVVNVLGGSTNAVLHLIAIADSVGIKLTIDDFQAVSDKTPFLADLKPSGKYLMNDLYNIGGTPALLKYLLKEGLIDGSGVTVTGKTMKENVASWPDFPADQDIIRPLNNPIKPSGHLQILRGSLAPGGSVGKITGKEGLRFEGIAKCYDYEDAFIESLERGEIKKGEKTVVIIRYEGPKGGPGMPEMLKPSAAIMGAGLGQDVALLTDGRFSGGSHGFLIGHIVPEAMEGGPIALARDGDRIVIDAEERVVDLDISTEELEKRRKEWNAPPLRYQKGTLKKYCTLVSDASHGCVTDGPI

SEQ ID NO: 425 - DNA, 1875 bp, Neosartorya fischeri
atgttcgcgtcgagtatccgatcgagagctctgggattgagcccacgagcccggtttgagaatacgtacgagaggaccttccctcgcattgcttctctctccctcctcaaaaatcggcaaatactaataactatcgttactagtcgtcttccatcttccactaccgagcgccgttataaatccgacgagaccctcaaccgaatctcctcgaaaatcacacaacccaaatcccagggtgcctcacaagcaatgctctacgccaccggcctgacagaggaagacatgtccaagccgcaggtcggtatctcctcggtgtggttcgagggtaacccatgtaacatgcacttgcatgacctgtctgcgattgtgcgtgattccgtgcttcgggcgggtctggttcctatgcgattcaactcggttggagtgtcggatgggatcagtatgggcacaaagggaatgagatacagcctacagagtcgggagctgatcgctgatggcattgagacagtgatgaatgcccagtggtatgatgcgaatgtgtcgctcccaggttgcgataagaatatgccaggtgtgttaatggcaatgggacgcacgaatcggcctagtatcatggtctatggcggcagtatcaaacccggatgcagtgcaaagggccaaaagttagacctggtcagtgcattccagtcatatggacagttcatcaccggccagatcgatgagaaggaacggtttgatataattcgcaatgcatgccccggcagaggtgcctgcggtggcatgtacacagctaatacgctggccacagccattgagactatgggtatgaccgttcccggtagcagtagttgcccggcagacgatcctaagaagcttgttgagtgcgaaaacatcggggaggtggttaagactatgctcagggaagatatcaagcccagggatgtcttgacacgtcaagcttttgagaatgcaatgattgtggtgaacgtgctgggtggcagcactaatgctgttctacatctgattgctattgctgactctgttggtatcaagttgactattgatgacttccagacagtgtctgacaagacaccattcctagctgatttgaagccatctggaaaataccttatgaatgacctatacaacatcggtggcacaccagccctccttaaatatctcctaaaggagggcttgatcgatggctcaggaattactgtcactggcaaaacaatgaaggagaatgtagcctcatggcctgacttccctgctaaccaggatatcattcgccccctcagcaaccctattaaaccatctggtcatctccagattcttcgcggatcgctggccccgggcggttctgttgggaagattactggaaaggagggtctgcggtttgagggcacagctaagtgctatgactacgaagatgcattcattgagtcccttgagcggggcgagatcaagaagggcgacaaaacagtcgtgattattcggtatgaaggtcccaagggtggcccaggaatgcctgagatgctcaagcccagcgcggccattatgggtgctggtcttggccaggacgttgcacttctcacggacgggagattctcaggtggcagtcacggattcttgatcggacatattgtgccggaagccatggagggtggcccgatcgcgttagcacgagacggtgatcggatcgtgattgatgctgaggaaagagtggttgatctggatatcccgattgaagagctcgagaagaggaggaaggagtggaaagcacccccgctccgataccagaagggaactttgaagaagtattgcacgctggtcagcgatgccagccatggttgtgtcacagacggcccgatctag

SEQ ID NO: 426 - protein, 624 aa, Neosartorya fischeri
MFASSIRSRALGLSPRARFENTYERTFPRIASLSLLKNRQILITIVTSRLPSSTTERRYKSDETLNRISSKITQPKSQGASQAMLYATGLTEEDMSKPQVGISSVWFEGNPCNMHLHDLSAIVRDSVLRAGLVPMRFNSVGVSDGISMGTKGMRYSLQSRELIADGIETVMNAQWYDANVSLPGCDKNMPGVLMAMGRTNRPSIMVYGGSIKPGCSAKGQKLDLVSAFQSYGQFITGQIDEKERFDIIRNACPGRGACGGMYTANTLATAIETMGMTVPGSSSCPADDPKKLVECENIGEVVKTMLREDIKPRDVLTRQAFENAMIVVNVLGGSTNAVLHLIAIADSVGIKLTIDDFQTVSDKTPFLADLKPSGKYLMNDLYNIGGTPALLKYLLKEGLIDGSGITVTGKTMKENVASWPDFPANQDIIRPLSNPIKPSGHLQILRGSLAPGGSVGKITGKEGLRFEGTAKCYDYEDAFIESLERGEIKKGDKTVVIIRYEGPKGGPGMPEMLKPSAAIMGAGLGQDVALLTDGRFSGGSHGFLIGHIVPEAMEGGPIALARDGDRIVIDAEERVVDLDIPIEELEKRRKEWKAPPLRYQKGTLKKYCTLVSDASHGCVTDGPI

SEQ ID NO: 427 - DNA, 1626 bp, Neosartorya fischeri
atgctgtatgcgactggtttggaggaagcggatatgaacaaggcccaggtgggaatctcctcggtgtggtttgagggaaacccttgcaacatgcacctgatggacttgtccttggtggtacgcgactcggtcgccagggccggcctggttccaatgcgttttaactcgattggcgtttccgacggaatcagcatgggcacgagcggtatgcgatacagtctgcagagtcgtgagatcatcgcggacggcattgagacggtcatgaacgggcagtggtatgacgcgaatatctcacttccaggatgcgataagaacatgcccggtgttgttatggccatgggccgggtcaaccgtccgagcattgtgatctatggtggtagtattaagcctggttgcagcgctggtggccagactttggatctggtgagcgcctttcagtcatatggccaatacattactggtcagatagatgaagcacagcgctttgacatcattcgccatgcgtgcccgggaagtggtgcgtgtggtggcatgtatacagcgaataccatggccacagctattgaagttctcgggctcacggttccaggcagtagtagctgccccgcagaagatccgcgcaagaaagctgaatgtgaagagattggagaaacagtcaagaacctcttgaaggaagatatccggccttcggatattttgacccgccaagcatttgagaacgcaatgatcgtggtcaatattttgggaggtagcaccaatgcagtcatgcatttgattgccattgcccaatctgtgggaattaagctcaccattgatgatttccaagctgtgtctgacaagacgccatttctggccgacctaaaaccatcaggaaagtatgtcatgcatgacctgtacaagatcggcggcacaccggccctactccggttcctgctcaaggagggcttgattgacgggtctggtattactgtgaccggcaaaacaatgaaggagaatgttgcatcttggcctgatttccctgaagatcagcccattatccggccactgagcgatcccatcaagcccacgggtcaccttcaaattctgcgaggatccttggcacctggaggctccgttggtaagatcaccggtaaagagggtctccgatttgaaggcagtgccaagtgctacgactatgaagatgcctttgtggatgctcttgaaaagggagaaattaagaagggtgaaaagacagttgttattatccgatacgaggggccaaagggtggtccaggtatgccggaaatgctcaagcctagtgccgccatcatgggtgccggactgggtcaggatgtcgccctccttaccgacggtcgattttctggtggcagtcatggattcctaatcggtcatattgttcctgaggcaatggatggtggtccaatcgccctggtcaaagatggggacagggtgattatcgacgcagagaagagggtggttgatctggatatatccggagaagagatgcagaggaggaagaaggcatggaaagcgcctgaacctcgggcaaagaaaggcactctaaagaagtatgcagctcttgtcagtgacgctagccatggctgtgtcactgatgggccactttga

SEQ ID NO: 428 - protein, 541 aa, Neosartorya fischeri
MLYATGLEEADMNKAQVGISSVWFEGNPCNMHLMDLSLVVRDSVARAGLVPMRFNSIGVSDGISMGTSGMRYSLQSREIIADGIETVMNGQWYDANISLPGCDKNMPGVVMAMGRVNRPSIVIYGGSIKPGCSAGGQTLDLVSAFQSYGQYITGQIDEAQRFDIIRHACPGSGACGGMYTANTMATAIEVLGLTVPGSSSCPAEDPRKKAECEEIGETVKNLLKEDIRPSDILTRQAFENAMIVVNILGGSTNAVMHLIAIAQSVGIKLTIDDFQAVSDKTPFLADLKPSGKYVMHDLYKIGGTPALLRFLLKEGLIDGSGITVTGKTMKENVASWPDFPEDQPIIRPLSDPIKPTGHLQILRGSLAPGGSVGKITGKEGLRFEGSAKCYDYEDAFVDALEKGEIKKGEKTVVIIRYEGPKGGPGMPEMLKPSAAIMGAGLGQDVALLTDGRFSGGSHGFLIGHIVPEAMDGGPIALVKDGDRVIIDAEKRVVDLDISGEEMQRRKKAWKAPEPRAKKGTLKKYAALVSDASHGCVTDGPL

SEQ ID NO: 429 - DNA, 1845 bp, Aspergillus niger
atgccttttctgcggtggcctccaggccagaaaatcatgatcacacctaccactcctttccgagctgccagaactctggcattcggtggacggatactatcgcccaaaaagtcatcctctcgtcttctctcctcaactgcacatagttatgccgacgaaacactgaacaaagtctcctctaagatcacacaacccaagtcccagggtgcatctcaagcgatgctttacgcgaccggcttgacggagaaagacatgtccaaggcacaggttggaatttcatcagtgtggttcgaagggaatccttgtaacatgcacttgatggatttgtcgtcgctggttcgcgagtcggtagccaaagctggcctggttcccatgcgtttcaactccatcggcgcctctgatggcattagtatgggcacatctggcatgcgattcagtttacagagccgagagatcattgctgatggaattgaaacggtcatgaatgcccagtggtatgatgctaatatctcgttgcctggctgtgataagaacatgccaggtgtgctgatggctatgggtcgggtcaaccgtccgagtatcatggtgtatggtggtagtatcaagcccggctgcagtgcggggggtaagccacttgacttggtcagcgcctttcaatcgtatggccaatatctcactggtgagatcgacgagaaggaacgatttgatattatccgacacgcttgcccaggtgctggtgcctgtgggggtatgtatacggctaatacactggcaacggccatcgagaccctcggaatgacggtccctggaagcagcagtacaccggcagaggatccgaggaagctggcagagtgtgaggacatcggtcagacggtgaagaatctgctgaaggaggacatccgtcccaaggatatcatgacacggcaggcatttgaaaatgctatgattgttgtgaatattcttggaggcagcaccaatgcagtgctgcacttgattgctatcgctaattccgttgggatcaaattgactatcgatgacttccaggctgtgtcagacaagacacctttcttagctgatctaaagccttccggcaagtatgtcatgcatgacctgtacaaagtcgggggcacgcctgcactgctgaagttcctgctcagggaaggccttattgacggctccggcgtcactgttactggcaaaaccatgaaagagaatgtagcctcatggcccgaattttcacctgagcagcccatcatccgccctctaagcaatcccatcaagccaaccggccacttgcagatccttcgtgggtcattggcccccggcggctcggttggaaaaatcaccggcaaagaaggtctacggttcgaaggtcttgctaaatgttacgactttgaggacgctttcattgaggctctcgaacgaggcgagatcaagaagggcgagaaaacggtcgttattattcgatatgaagggcccaaaggcggccccgggatgcctgagatgctcaagcccagctcagctatcatgggcgcgggattgggtcaggatgttgcgctactcactgatggaagattctctggaggtagtcatggctttttaattgggcatgttgtgcctgaggctatggagggtgggcccattgccctggtgaaggatggcgatcggatcgtaattgatgcggagcaaagagtggttgacctgctgatcaccccagaagaaatggcaaagagaagagtgtcttggacagcaccggcacctcgggcgaagaaggggacattaagcaagtatgcgaagctggtgagcgatgcgagccatgggtgcgtgacggatggtccaatatag

SEQ ID NO: 430 - protein, 613 aa, Aspergillus niger
MPFLRWPPGQKIMITPTTPFRAARTLAFGGRILSPKKSSSRLLSSTAHSYADETLNKVSSKITQPKSQGASQAMLYATGLTEKDMSKAQVGISSVWFEGNPCNMHLMDLSSLVRESVAKAGLVPMRFNSIGASDGISMGTSGMRFSLQSREIIADGIETVMNAQWYDANISLPGCDKNMPGVLMAMGRVNRPSIMVYGGSIKPGCSAGGKPLDLVSAFQSYGQYLTGEIDEKERFDIIRHACPGAGACGGMYTANTLATAIETLGMTVPGSSSTPAEDPRKLAECEDIGQTVKNLLKEDIRPKDIMTRQAFENAMIVVNILGGSTNAVLHLIAIANSVGIKLTIDDFQAVSDKTPFLADLKPSGKYVMHDLYKVGGTPALLKFLLREGLIDGSGVTVTGKTMKENVASWPEFSPEQPIIRPLSNPIKPTGHLQILRGSLAPGGSVGKITGKEGLRFEGLAKCYDFEDAFIEALERGEIKKGEKTVVIIRYEGPKGGPGMPEMLKPSSAIMGAGLGQDVALLTDGRFSGGSHGFLIGHVVPEAMEGGPIALVKDGDRIVIDAEQRVVDLLITPEEMAKRRVSWTAPAPRAKKGTLSKYAKLVSDASHGCVTDGP

SEQ ID NO: 431 - DNA, 1848 bp, Aspergillus niger
atgcttctttcccaaacccgggggcgtatgccctccgctctccggagcatcgccaagcgctctttgctgaacagtcgccctctgtctaccactctgcccaagcaacagaacggcaacgatgacgagtatactggtctcaacaaggtctcccgccacattacccagcccatctcccagggtgcttcccaggccatgctgtatgccgcaggcctcactgaggcggacatgaacaaggctcaggtcggcatttcttctgtctggtacaatggcaacccctgcaacatgcatctgctcgatcttaacaaccgtgtccgcgagggtgtccagaaggccggtttggtcggtttccagttcaacaccgtcggtgttagcgatgctatcagtatgggtaccaagggaatgcgattctctctccagagtcgtgatctgattgccgactctatcgagaccgttatgggtggtcaatggtatgacgctaacatcagcattcccggctgtgacaagaacatgcctggtgtgttgatggcaatgggacgagtgaaccgccccagtttgatggtctacggtggaaccatcaagcctggttgcgcctccatgcagggcaacgccgacattgatatcgtctccgccttccaggcctatggtcagttcatcagtaaggaaatcaccgagccccagagatttgacattatccgcaacgcctgccctggaggtggtgcttgcggtggtatgtacactgccaataccatggccactgctatcgaagtcatgggcatgacccttcctggatcctcttccaaccccgccgagtctgacgctaagtaccttgaatgtcttgcggctggtgaggccatcaagaccctgctcaaggaggacattcgtccttcggacatcctgactcgccaagctttcgagaacgccatggtcttggtcaacatcactggtggctccaccaacgccgttcttcacttgattgccattgcggactctgttggtatcaagctcgacattgaagacttccagtccgtctcggatcgcattcctttcctggcggaccttaagccttccggcaagtacgtcatggctgaccttcacaagatcggtggtaccccctccctgctcaagttcttgctgaaggaaggtctcatcgatggctctggcatgactgtcactggtcagaccctggccaagaacttggagaatgtgccggacttccctgaggatcagaagatcatccgtcccctgtccaaccccatcaaggagactggccacatccagatcttgaggggttctctggccccgggtggcagtgtcggcaagatcactggtaaggaaggaaccgtcttcactggaaaggctcgcgtctttgacgacgaggatgatttcattgctgctctcgagcgcaacgagatcaagaaggaggagaagactgttgttgtcatccgctacactggtcctaagggaggacctggcatgcccgaaatgctgaagccctcttccgccctgatgggtgccggtctcggacagtcctgcgctctgatcaccgatggccgtttctctggtggttctcacggtttcttgatcggacacattgttcccgaagccgccgtcggtggccccattggcttggttaaggatggtgatgtcatcaccattgacgccgagaagcgtgttctggaccttgatgttgaggagaccgagctcgcgcaaagaagaaagcagtgggaagccgacagggctgctggcaagctccctcccaccggcctgaccctgagaggtactctcggcaagtacgctagaaccgtcaaggatgccagccacggctgtatcaccgactctctcgaataa

SEQ ID NO: 432 - protein, 615 aa, Aspergillus niger
MLLSQTRGRMPSALRSIAKRSLLNSRPLSTTLPKQQNGNDDEYTGLNKVSRHITQPISQGASQAMLYAAGLTEADMNKAQVGISSVWYNGNPCNMHLLDLNNRVREGVQKAGLVGFQFNTVGVSDAISMGTKGMRFSLQSRDLIADSIETVMGGQWYDANISIPGCDKNMPGVLMAMGRVNRPSLMVYGGTIKPGCASMQGNADIDIVSAFQAYGQFISKEITEPQRFDIIRNACPGGGACGGMYTANTMATAIEVMGMTLPGSSSNPAESDAKYLECLAAGEAIKTLLKEDIRPSDILTRQAFENAMVLVNITGGSTNAVLHLIAIADSVGIKLDIEDFQSVSDRIPFLADLKPSGKYVMADLHKIGGTPSLLKFLLKEGLIDGSGMTVTGQTLAKNLENVPDFPEDQKIIRPLSNPIKETGHIQILRGSLAPGGSVGKITGKEGTVFTGKARVFDDEDDFIAALERNEIKKEEKTVVVIRYTGPKGGPGMPEMLKPSSALMGAGLGQSCALITDGRFSGGSHGFLIGHIVPEAAVGGPIGLVKDGDVITIDAEKRVLDLDVEETELAQRRKQWEADRAAGKLPPTGLTLRGTLGKYARTVKDASHGCITDSLE

SEQ ID NO: 433 - DNA, 1833 bp, Aspergillus terreus
atgcttctctctcagacccggggccgtctgccctccctgcggaccctcaagcggtccatggcggtccgtccgctctctaccaccctccccaagcacaaggccgatgagaaagagcctgtcctcaacaaagtctcccgccatgtcacccaacccatctcccagggtgcgtcccaggccatgctctacgccaccggtctcaccgaggccgacatgaacaaggcccaggtcggtatctcctccgtctggtacaatggcaacccctgcaacatgcacctcctcgacctcaacaaccgtgtgcgggagggtgtccagaaggctggcctggtcgggttccagttcaacaccgtcggagtcagcgacgcgatcagcatgggtacctccggtatgcgcttctcgctgcagagccgtgatctcattgccgactccattgagactgtcatgggtggtcagtggtacgacgccaacatcagtatccctggttgcgacaagaacatgcccggtgtcctgatggccatgggcagagtcaaccgtcccagtctgatggtttacggtggttccattaagcccggctgcgcttcgatgcagaacaacgccgatatcgatatcgtctccgccttccaggcgtacggtcagttcatcagcggagagatcaccgagccccagcgtttcgacatcatccgcaacgcctgccccggaggtggcgcgtgcggtggtatgtacaccgccaacaccatggccaccgccatcgaggtcatgggtatgacccttcctggttcctcctccaaccccgccgagtcggcggccaagaacatcgagtgtctggcggccggtgaggccatcaagaagcttctggtggaagacatccgtccctccgatatcctgactcgccaggccttcgagaatgccatgattgttgtgaacattaccggtggttcgaccaatgcggtgctgcaccttatcgccattgccgattcggtcggcatcaagctagatattgaggacttccagaaggtctcggaccgtgtgccgttcctggctgacctcaagccttccggcaagtacgtcatggcggacctgcacaagatcggtggtactccttctctgctcaagttcctgcttaaggagggcctgatcgatggctctggtatgaccgtcaccggtcagaccctggccaagaacctggagaacgtgccggacttccccgaggaccagaagatcatccgtcctctgtctaaccccatcaaggagaccggtcacatccagattctccgtggctctctggcccctggcggtagtgtcggtaagatcactggtaaggagggtaccgttttcaccggtaaggctcgcgtcttcgaccacgaggacgacttcatcgctgcgctcgagcgcaaggagatcaagaaggaggagaagacggtcgttgtcatccgttatactggacccaagggtggtccgggtatgcctgaaatgctgaagccttcttctgccctcatgggcgccggtctgggcggctcctgcgctctgatcaccgacggacgtttctccggcggctctcacggattcctgatcggacatatcgtccccgaggctgctgtcggtggaccgattggtctggttaaggacggcgatgtgatcaccatcgacgccgtcaagcgtgtgctggatctggacgttgacgagaccactctggccgagagaagaaagcagtgggaggccgacaaggaggctggccgtctccctcctaccggtctgactctgcgtggtaccctgggcaagtatgctagaaatgtcaaggatgccagccacggctgcatcaccgatgctcttgactaa

SEQ ID NO: 434 - protein, 610 aa, Aspergillus terreus
MLLSQTRGRLPSLRTLKRSMAVRPLSTTLPKHKADEKEPVLNKVSRHVTQPISQGASQAMLYATGLTEADMNKAQVGISSVWYNGNPCNMHLLDLNNRVREGVQKAGLVGFQFNTVGVSDAISMGTSGMRFSLQSRDLIADSIETVMGGQWYDANISIPGCDKNMPGVLMAMGRVNRPSLMVYGGSIKPGCASMQNNADIDIVSAFQAYGQFISGEITEPQRFDIIRNACPGGGACGGMYTANTMATAIEVMGMTLPGSSSNPAESAAKNIECLAAGEAIKKLLVEDIRPSDILTRQAFENAMIVVNITGGSTNAVLHLIAIADSVGIKLDIEDFQKVSDRVPFLADLKPSGKYVMADLHKIGGTPSLLKFLLKEGLIDGSGMTVTGQTLAKNLENVPDFPEDQKIIRPLSNPIKETGHIQILRGSLAPGGSVGKITGKEGTVFTGKARVFDHEDDFIAALERKEIKKEEKTVVVIRYTGPKGGPGMPEMLKPSSALMGAGLGGSCALITDGRFSGGSHGFLIGHIVPEAAVGGPIGLVKDGDVITIDAVKRVLDLDVDETTLAERRKQWEADKEAGRLPPTGLTLRGTLGKYARNVKDASHGCITDALD

SEQ ID NO: 435 - DNA, 1824 bp, Aspergillus clavatus
atgcttctctctcagacccggggccgtgtgccctctgttctccggagcttctcccgccgctccctctctaccaccatccccagatacaccgccgataaggatgactctgctctcaacaaggtgtcccgcaatgtcacacagcccatctcgcagggtgcctcccaggccatgctgtacgccacgggtcttaccgaggcggacatgaacaaggctcaggtcggtatctcgtcggtctggtacaatggcaacccctgcaacatgcatctgctcgatctcagcaaccgcgttcgcgaaggagtccagaaggctggtctggttggcttccagttcaacacggtcggtgtcagtgatgccatcagcatgggcaccaagggcatgcgcttctccctgcagagccgtgacctgattgccgactccatcgagaccgtcatgggtggtcagtggtacgacgccaacatcagtatccccggttgcgacaagaacatgcccggtgtgctcatggccatgggccgtgtcaaccgccccagtttgatggtgtatggtggtaccatcaagcccggctgcgccaaaacccagaacaacgccgacatcgacattgtctcggccttccaggcgtacggacagttcctgactggcgagatcaccgagccccagcgcttcgacatcatccgtaacgcctgccccggcggtggtgcttgcggtggtatgtacactgccaacaccatggccaccgccatcgaggtcatgggtatgaccctgcctggctcgtcgtccaaccccgctgagtctaaggccaaggaccttgagtgcttggctgctggtgaggccatcaagcgcctgctgaaggaggatatccgtccctcagacatcctgacccgccaggccttcgagaacgccatgattgtggtcaacatcaccggtggctccaccaacgccgtacttcacttgatcgccattgccgactccgtcggcatcaagctggacatcgaggagttccagaaggtctcggaccgcacccccttcctggcggacctcaagccctccggcaagtacgtcatggccgatctgtacgacatcggcggaactcctgctctgctcaagttcctgctcaaggagggcgtcatcgacggctccggcatgaccgtcaccggtgagaccctggccaagaacttggagaaggtgcccggcttccccgaggaccagaagatcatccgtcctttttcgaaccccatcaagaagactggccacattcagatcctgcgcggctccctggcccccggcggcagtgttggcaagatcaccggtaaggagggtacccgcttcgttggcaaggcccgcgtcttcgaccacgaggacgacttcattgccgctctcgagcgcaacgaaatcaagaaggaggacaagaccgttgtcgtcatccgctacaccggccctaagggtgggcccggcatgcctgaaatgctcaagccctcctccgccctgatgggcgccggcctcggctcctcctgcgcactcatcaccgacggtcgtttctccggcggctcccacggcttcctgattggccacatcgtccccgaggccgccgtcggcggccccatcggcctcgtccaggacggcgacatcatcaccatcgacgccgagaagcgcatcctcgacctcgacgtccccgagcccgagctcgcccagcgcagaaaggattgggaggccgccaaggccgccggcaagttgccccagaccggtctcaccatgagaggtaccctgggcaaatatgccagaaccgtcaaggatgccagccacggctgcattactgattatatagaataa

SEQ ID NO: 436 - protein, 607 aa, Aspergillus clavatus
MLLSQTRGRVPSVLRSFSRRSLSTTIPRYTADKDDSALNKVSRNVTQPISQGASQAMLYATGLTEADMNKAQVGISSVWYNGNPCNMHLLDLSNRVREGVQKAGLVGFQFNTVGVSDAISMGTKGMRFSLQSRDLIADSIETVMGGQWYDANISIPGCDKNMPGVLMAMGRVNRPSLMVYGGTIKPGCAKTQNNADIDIVSAFQAYGQFLTGEITEPQRFDIIRNACPGGGACGGMYTANTMATAIEVMGMTLPGSSSNPAESKAKDLECLAAGEAIKRLLKEDIRPSDILTRQAFENAMIVVNITGGSTNAVLHLIAIADSVGIKLDIEEFQKVSDRTPFLADLKPSGKYVMADLYDIGGTPALLKFLLKEGVIDGSGMTVTGETLAKNLEKVPGFPEDQKIIRPFSNPIKKTGHIQILRGSLAPGGSVGKITGKEGTRFVGKARVFDHEDDFIAALERNEIKKEDKTVVVIRYTGPKGGPGMPEMLKPSSALMGAGLGSSCALITDGRFSGGSHGFLIGHIVPEAAVGGPIGLVQDGDIITIDAEKRILDLDVPEPELAQRRKDWEAAKAAGKLPQTGLTMRGTLGKYARTVKDASHGCITDYIE

SEQ ID NO: 437 - DNA, 1842 bp, Aspergillus nidulans
atgcttctttcacagactcggggccgcctgccctctgctctccgcagcttggccaacagagctgctattcgtccaatctctactacactcccccgccaaaaagcgtcgccaaaagatgatgagcccgtcctcaacaaggtctcccgccatatcacacagccggtgtcccagggtgcttcccaggcgatgctgtacgctacgggtcttactgaggccgacatgaacaaggcccaggttggtatttcctcggtctggtacaacggcaacccttgcaacatgcacctcctcgacctgaacaaccgtgtccgcgagggtgtgcaaaaggctggccttatcgggtaccagttcaacaccattggtgtcagtgatggaatcagtatgggtaccagtggtatgcgttactcgcttcagagccgtgacctcatcgccgactctatcgagaccgtcatgggtggtcagtggtacgacgccaacatcagcatccccggttgcgacaagaacatgcccggtgttttgatggctatgggacgagtcaaccgccccagtttgatggtttacggtggaaccatcaagcccggctgcgcatccatgcagggcaacgctgacatcgatatcgtctctgccttccaagcctacggccagttcatcagcggtgagatcaacgagccccagcgcttcgatatcatccgccacgcctgccccggtggcggcgcttgcggtggaatgtacactgccaacaccatggccacggccatcgaagtcatgggtatgaccctcacgggctcctcgtccaacccggccgaatcgcaagccaaatacgacgaatgtcttcgcgctggtgaagccatcaagcgcctcctcgtcgaagacatccgcccctccgacatcatgactcggcaagccttcgagaacgccatggtcgttgtcaacatcaccggcggctccaccaatgctgtccttcacctcatcgccattgccgactccgtcggcatcaagctcacaattgacgacttccaagccgtctctgaccgcacccccttcctcgcagacctcaagccatccggcaaatacgttatggccgacctccacaacatcggcggcaccccctccctcctcaaattcctcctcaaggaaggcgtcattgatggctccggcatcacagttaccggtgaaactctcgccaagaacctcgagaaagtccccgatttccccgaggaccagaaaatcattcgccccttctccaaccccatcaaggaaacaggccacatccagatcctgcgcggttcgctcgcgccgggcggttgcgttggtaagattaccggtaaggagggaaccgttttcacgggcaaggcccgcgtctttaaccacgaagacgacttcattgccgccctggagcgcaaggaaatcaccaaggatgagcaaactgtcgttgtgattcgctacaccggtcccaagggtggtcccggtatgcctgaaatgctcaagccttcaagcgccctcatgggtgctggcctcggccaaacctgcgccctgatcacagacggacgcttctccggtggttcgcacggcttccttattggacacatcgtcccagaggctgccgtcggtgggccgattggtctcgtacacgacggcgacgtgatcaccattgatgccgagaagcgcgttttggaccttgacgttgacgaggcggaactcgctaagcgacggaagcagtgggaggctgataaggcggcgggcaagttgccccagaccgggttgaacttgcgcgggacgcttggaaagtatgcccggaatgtcaaggatgctagttccgggtgtattacggacgctttcgattaa

SEQ ID NO: 438 - protein, 613 aa, Aspergillus nidulans
MLLSQTRGRLPSALRSLANRAAIRPISTTLPRQKASPKDDEPVLNKVSRHITQPVSQGASQAMLYATGLTEADMNKAQVGISSVWYNGNPCNMHLLDLNNRVREGVQKAGLIGYQFNTIGVSDGISMGTSGMRYSLQSRDLIADSIETVMGGQWYDANISIPGCDKNMPGVLMAMGRVNRPSLMVYGGTIKPGCASMQGNADIDIVSAFQAYGQFISGEINEPQRFDIIRHACPGGGACGGMYTANTMATAIEVMGMTLTGSSSNPAESQAKYDECLRAGEAIKRLLVEDIRPSDIMTRQAFENAMVVVNITGGSTNAVLHLIAIADSVGIKLTIDDFQAVSDRTPFLADLKPSGKYVMADLHNIGGTPSLLKFLLKEGVIDGSGITVTGETLAKNLEKVPDFPEDQKIIRPFSNPIKETGHIQILRGSLAPGGCVGKITGKEGTVFTGKARVFNHEDDFIAALERKEITKDEQTVVVIRYTGPKGGPGMPEMLKPSSALMGAGLGQTCALITDGRFSGGSHGFLIGHIVPEAAVGGPIGLVHDGDVITIDAEKRVLDLDVDEAELAKRRKQWEADKAAGKLPQTGLNLRGTLGKYARNVKDASSGCITDAFD

SEQ ID NO: 439 - DNA, 1848 bp, Aspergillus oryzae
atgcttctttcacaaacccgggggcgtatgccctctgctctgcggagcctctccaggcggtccgccgtcaatgttcgtcccctctctaccaccctccccaagcaaaaggcctcttcctccgaagacgacaacgctctgaacaaggtctcccgccatgtcacacagcccatctcgcagggtgcttcccaggccatgctttacgctaccggtctcaccgaggaggacatgaacaaagctcaagtcggtatctcctccgtttggtatagcggtaacccctgtaacatgcatctgctcgatctcaaccaccgcgtcaagcaaggtgtggaacaggcaggcttgatcggcatgcagttcaacaccgtcggtgtcagtgatgcaatcagtatgggtacgaagggtatgcgatattctcttcagagtcgtgatctgattgccgactctatcgagactgttatgggtggtcagtggtacgatgccaacatcagtatcccgggttgcgacaaaaacatgcccggtgtgttgatggccatgggcagagtcaaccggccgagcattatgttgtacggaggcaccatcaagcccggttgtgccgctacccaaaacaatgccgagattgacatcgtctccgcattccaggcctacgggcagttcctgagcggcgacattaccgagcctcagcgatttgatattatccgtaacgcttgcccaggaggcggtgcctgcggtggtatgtacacggccaacaccatggccaccgccattgagaccattggtatgaccctccctggctcttcttccaaccccgccgagtcccgcgccaaggaccttgagtgtctggctgttggtggggcgatcaagaagcttctgaaggaggacatccgccctagggatattatgacccgccaagctttcgaaaacgccatggttgtggtgaacatcaccggtggctcgaccaacgctgtgctgcacttgattgccatcgctgattcggtcggcatcaagctggatattgaggacttccagtccgtctccgaccgtattcctttcttggctgatctgaagccatcgggcaagtacgtcatggccgacatgcacaagatcggaggtacccccgcactgctcaagttcctgctcaaggaaggcctcatcgatggttccggcatgactgtcaccggtgagactctagccaagaacctcgagaaggttcccgatttccccgaagatcagaagatcatccgccctctgtccaaccccatcaaggagactggccatatccagattctgaagggatccctggctccgggtggcagtgttggtaagatcactggcaaggagggtacttctttcactggtaaggcacgtgtcttcgatgatgaggatgatttcatcgctgctctggagcgtggtgagatcaaaaaggaggacaagactgttgtggttatccgctacaccgggcccaaggggggtcctggtatgcccgaaatgttgaagccctcttctgcccttatgggctatggtctcggacagtcggttgccctcatcaccgatggacgtttctccggcggctctcatggcttcctgatcggacacattgtccctgaggctgctgttggtggacctattggtctcgtcaaggatggtgatgtcatcgtcattgatgctgagaagcgcgttctcgaccttgaggttgaccaggagactctcgccgagagacgcaagcagtgggaagccgataaggaggccggcaagctgcctcccaccggtctgactatgagaggaaccctcggcaagtacgctaggaccgtcaaggatgccagccacggctgtatcaccgatgctcttgattaa

SEQ ID NO: 440 - protein, 615 aa, Aspergillus oryzae
MLLSQTRGRMPSALRSLSRRSAVNVRPLSTTLPKQKASSSEDDNALNKVSRHVTQPISQGASQAMLYATGLTEEDMNKAQVGISSVWYSGNPCNMHLLDLNHRVKQGVEQAGLIGMQFNTVGVSDAISMGTKGMRYSLQSRDLIADSIETVMGGQWYDANISIPGCDKNMPGVLMAMGRVNRPSIMLYGGTIKPGCAATQNNAEIDIVSAFQAYGQFLSGDITEPQRFDIIRNACPGGGACGGMYTANTMATAIETIGMTLPGSSSNPAESRAKDLECLAVGGAIKKLLKEDIRPRDIMTRQAFENAMVVVNITGGSTNAVLHLIAIADSVGIKLDIEDFQSVSDRIPFLADLKPSGKYVMADMHKIGGTPALLKFLLKEGLIDGSGMTVTGETLAKNLEKVPDFPEDQKIIRPLSNPIKETGHIQILKGSLAPGGSVGKITGKEGTSFTGKARVFDDEDDFIAALERGEIKKEDKTVVVIRYTGPKGGPGMPEMLKPSSALMGYGLGQSVALITDGRFSGGSHGFLIGHIVPEAAVGGPIGLVKDGDVIVIDAEKRVLDLEVDQETLAERRKQWEADKEAGKLPPTGLTMRGTLGKYARTVKDASHGCITDALD

SEQ ID NO: 441 - DNA, 1836 bp, Ajellomyces capsulatus
atgctccgattacaagcacggggccggatgcccaactgcttcaaaagactgcttttcccattgtcctgtcgagctctctccgcaactccatacccatattcatcttcgtcctcacaggagaagaagctcaacagtgtttcccaacatgtaacgcaacccatttcccaaggtgcctcacaggccatgctttacgctacgggcctaatgccggaggatatgtcgaaagctcaagttggcatctctagcgtctggtacaacggaaacccctgcaacatgcatctcctcgatctcagcaaccgtgtgcgcgaaggtgtgcaaaaggcgggactcataggttaccagttcaacactgttggcgtcagtgacgctatcagcatgggtacgtcaggtatgcggtacagtttgcagagtcgggatctcatcgcggactcgattgagacggtcatgggtggtcaatggtatgatgctaacatcagcatccccgggtgtgacaagaatatgcctggcgtggttatggcaatgggaagagtaaaccggccaagtttgatggtttatggcggaacaattaagcccgggtgcgcggtaacccaaaacaacgccgatatcgacatcgtgtctgcgttccaggcttacggccaattcataactggtgagatcactgaggctcagcgatacgacatcatccgacatgcttgccctggcggtggtgcttgtggggggatgtacactgcaaacaccatggcgtctgcgatcgaagttatgggaatgacgttaccgggatcttcatcgaaccctgcagaatccaaagccaaggatctagaatgcctgacggctggggaagcaattaaaacccttctcaaggaggatatccgtcccactgacatcttgacgcgccaggcctttgaaaatgcaatggttcttgtcaacatcaccggcggctccaccaacgcagtgctccatctgatcgctatagctgactctgtcggaattaaactcacaattgacgatttccagtcagtcagtgaccgcatccccttcctcgcagatctcaagccttccggtaaatatgttatggccgatcttcatacaattggtggtactccctcattactcaagttcctcttgaaggagggtctcatcgacggctctggaattaccgtgactggtcaaaccctggccaagaacctcgagaaggttcctgaattcccttcagatcagaaaatcattcgacccctcaacaaccccatcaagaaaactgggcacatccagatcctccgcggaagcctcgcccctgaaggcagcgtcggcaaaattacaggaaaggagggtaccaagttcactggcaaggcgaaggtctacgatcatgaagacgattttattaccgcattagaacagaatgagatttcgaaggacgagaagacagtcgtggtaattcgttacactgggcccaagggtggtccgggaatgcctgaaatgctcaagccttcctccgcccttatgggcgcggggctaggttcatccgtcgccttgatcacagacggccgtttcagtggtggctctcatggcttcctgatcggccacatcgttcccgaagccgcagtcgggggccctattgcgctcgtccacgatggcgatgtcatcaccattgacgccgaaaaacgtttgctcgaccttgacgtctccgaacacatcctagctcagcgtaggaaggaatgggccgatagggagagtaaaggactaaatcccgttacgggaatgaaaatgagagggacgctgggaaaatatgctagatctgtcaaggacgcaagtcacggatgcatcaccgacgcattatag

SEQ ID NO: 442 - protein, 611 aa, Ajellomyces capsulatus
MLRLQARGRMPNCFKRLLFPLSCRALSATPYPYSSSSSQEKKLNSVSQHVTQPISQGASQAMLYATGLMPEDMSKAQVGISSVWYNGNPCNMHLLDLSNRVREGVQKAGLIGYQFNTVGVSDAISMGTSGMRYSLQSRDLIADSIETVMGGQWYDANISIPGCDKNMPGVVMAMGRVNRPSLMVYGGTIKPGCAVTQNNADIDIVSAFQAYGQFITGEITEAQRYDIIRHACPGGGACGGMYTANTMASAIEVMGMTLPGSSSNPAESKAKDLECLTAGEAIKTLLKEDIRPTDILTRQAFENAMVLVNITGGSTNAVLHLIAIADSVGIKLTIDDFQSVSDRIPFLADLKPSGKYVMADLHTIGGTPSLLKFLLKEGLIDGSGITVTGQTLAKNLEKVPEFPSDQKIIRPLNNPIKKTGHIQILRGSLAPEGSVGKITGKEGTKFTGKAKVYDHEDDFITALEQNEISKDEKTVVVIRYTGPKGGPGMPEMLKPSSALMGAGLGSSVALITDGRFSGGSHGFLIGHIVPEAAVGGPIALVHDGDVITIDAEKRLLDLDVSEHILAQRRKEWADRESKGLNPVTGMKMRGTLGKYARSVKDASHGCITDAL

SEQ ID NO: 443 - DNA, 1845 bp, Coccidioides immitis
atgcttcagctaaggcctcgcgggcatatgccctacaggcaattgctcacttatctctctcaccgtgccttttcttccagatcgacgttccagcagaagtcttcgtcgaatcccccgtcaaaatcaggaaagccattaaatgaagtatccagccatatcacgcagccaatctcccagggcgcttcccaggctatgctttacgctaccgggctttcgacggacgacatgtccaagcctcaggtcgggatctccagtgtctggtacaatgggaatccctgcaacatgcacctcctggacctaagcaacatcgtgcgggaaggcgtgcaaaaggcaggattgatcggatatcaattcaacaccattggtgttagtgacggaattagcatgggaacaaaaggaatgagatacagcttgcagagcagagacctaatcgccgattccatagagaccgtcatgggtggtcagtggtacgacgcaaatatcagtctgccgggatgcgataaaaacatgccgggagttatcatggctatgggtcgtgtgaaccggccgagtttgatggtatatgggggaacgatcaggccgggctgtgctgcaacacaaaacaatgctgatatcgatatcgtgtccgccttccaggcatacggccaattcttgactggggagatctccgaggagcagcgatttgatattatccgccatgcctgccctggtggtggtgcatgtggtggaatgtacaccgcaaacaccatggcttcggctatcgaggtcatgggaatgacccttccgggctcttcctccaacccagcagaatctaaggcaaagaaggccgaatgtctggctgcgggcgaagccatcaagaaccttctcatcgaggatattcgaccatccgacatcctcaccaggaccgcatttgaaaacgccatgatcttggtgaacatcactggaggctccaccaacgcggtcctccacctcattgccatggccgactccgtcggcatcaaactcaccattgatgacttccaggccgtcagcgatcgtaccccgttcctcgcagaccttaagccatccggaaagtacgtcatggctgatctgcacaacattggcggcaccccatccctgattaaattcctactgaaggagggtgtcctcgacggttcgggaatgactgttaccggtcagaccttggccaagaacgtagagaatgtccctgacttcccatctgaccaaaagatcatccgacctttcagcaacccaatcaagaagaccggccatcttcaaatcctccgtggcagcctcgctcctgaggggagtgtaggcaagatcacaggcaaagaaggaacaagtttcacaggcaaagctagagtgtatgacgatgaagatgattttattgcctctttggaacgaaacgaaattaaaaaggaagagaaaactgtcgttgttatccgatatactggaccgaagggaggaccaggaatgccagagatgcttaagccttcttctgccctgatgggtgccggattgggctcttctgttgccctcatcacggacgggcgtttcagtggtggttctcatggcttcttgatcggacacatcgtccctgaagccgcggttggcggaccaatcgccctcgttgaagacggcgacatcatcaccatcgacgccgagaagcgagttctcgatcttgaagtcggtgaagacgttctcgcgcaaagaaggaagaagtggcaggagaaacaggaggcaggcctcggtcgtccaactggattgacgatgaggggaactctgggtaaatatgccagagctgtgacggatgctagtcatggatgtatcaccgacggtgtatga

SEQ ID NO: 444 - protein, 614 aa, Coccidioides immitis
MLQLRPRGHMPYRQLLTYLSHRAFSSRSTFQQKSSSNPPSKSGKPLNEVSSHITQPISQGASQAMLYATGLSTDDMSKPQVGISSVWYNGNPCNMHLLDLSNIVREGVQKAGLIGYQFNTIGVSDGISMGTKGMRYSLQSRDLIADSIETVMGGQWYDANISLPGCDKNMPGVIMAMGRVNRPSLMVYGGTIRPGCAATQNNADIDIVSAFQAYGQFLTGEISEEQRFDIIRHACPGGGACGGMYTANTMASAIEVMGMTLPGSSSNPAESKAKKAECLAAGEAIKNLLIEDIRPSDILTRTAFENAMILVNITGGSTNAVLHLIAMADSVGIKLTIDDFQAVSDRTPFLADLKPSGKYVMADLHNIGGTPSLIKFLLKEGVLDGSGMTVTGQTLAKNVENVPDFPSDQKIIRPFSNPIKKTGHLQILRGSLAPEGSVGKITGKEGTSFTGKARVYDDEDDFIASLERNEIKKEEKTVVVIRYTGPKGGPGMPEMLKPSSALMGAGLGSSVALITDGRFSGGSHGFLIGHIVPEAAVGGPIALVEDGDIITIDAEKRVLDLEVGEDVLAQRRKKWQEKQEAGLGRPTGLTMRGTLGKYARAVTDASHGCITDGV

SEQ ID NO: 445 - DNA, 1830 bp, Botryotinia fuckeliana
atgctctcacaattgagaacgagggcaaatgcctctcttctcacctcaagaagagcttcacaatatgtgcgctctctatcgtccacatcctctctccgcacatcctccaatgactcagaaccacagctcaacagaacctcagctgctatcacacaaccaaaatcacaaggtgcttcgcaggcaatgttatatgccactggtatgaccgaggaaagattaaacaaagcacaagttggtatctcttcagtatggtggtcgggaaatccttgcaacatgcatcttttggaactcaaccacaaagtaaaggaaggagtagagagagccggtttggtaggatatcaattcaacaccattggagtttcggacggtatttctatgggtacaaagggtatgagatacagtcttcagtcaagagatttgattgcggatagtattgaaactgtgatgggtggtcaatggtatgatgccaacatttcgattcctggatgtgacaagaacatgcctggtgttatgatggcaattggcagagtcaacagaccagcccttatggtttatggtggttctattaaaccagggtgtgccgcaacacaaaacaacgcagatatcgatattgtctccgcattccaagcctacggacaattcattactggagagattacagaagaacaaagattcgatgttattcgtcatgcttgcccaggtcaaggtgcatgtggtggaatgtataccgcaaacaccatggcatcagctatcgaaattatgggaatgactcttcctggatcttctaccaaccccgcagattcaaaggccaaattacttgaatgctacgcagctggtggtgcaatcaaaactcttctcaaggaggacatcagacctagagatatcatgacaagacaggctttcgaaaatgctatggttcttgttaccattactggaggatctaccaacgctgttcttcatcttattgctatggcagatgctgtaggaatcaagctcacaatcgatgatttccaagctgtttctgaccgaacacctttcctcgcagacctcaaaccatctggtaaatacgtcttcaatgatctttacagcatcggtggtactccttctcttatcaaactcctcatcaaggaaggtgtcattgatggatcaggaatgactgttactggtaagacccttgctgagaacgtcaaggatgttcgtgatttcccatccgaccaagaaattattcgcccattctcaaaccccatcaaaaagtctggtcacattcaaattctccgcggttccctcgcaccaggtggatccgttggtaaaatcaccggtaaagaaggattacgattcgttggaaaagctaaggtttatgatgctgaaaatgatttcatcgaagcccttgagcgtggcgaaatcaagaagggagagaagaccgttgtagtcattcgttatgaaggaccaaagggtggaccaggtatgccagaaatgttaaaaccatcctcggcaatcatgggtgcaggacttggaaaggatgtcgctcttattaccgatggacgtttcagtggaggatctcatggattcttgattggacatattgtaccagaggcacaagtcggtggaccaattggattggttagggatggtgatactattgttattgatgctgagacgagagtattggatttggaagttgagggtggtgaggaggaattggagaggaggagaaaagaattcgtcgcacctcctttgaaatataccaagggtactttggcgaaatactcgagattggtacaagatgctagtcatggatgtattaccgatggagaaatcgttgaggcatga

SEQ ID NO: 446 - protein, 609 aa, Botryotinia fuckeliana
MLSQLRTRANASLLTSRRASQYVRSLSSTSSLRTSSNDSEPQLNRTSAAITQPKSQGASQAMLYATGMTEERLNKAQVGISSVWWSGNPCNMHLLELNHKVKEGVERAGLVGYQFNTIGVSDGISMGTKGMRYSLQSRDLIADSIETVMGGQWYDANISIPGCDKNMPGVMMAIGRVNRPALMVYGGSIKPGCAATQNNADIDIVSAFQAYGQFITGEITEEQRFDVIRHACPGQGACGGMYTANTMASAIEIMGMTLPGSSTNPADSKAKLLECYAAGGAIKTLLKEDIRPRDIMTRQAFENAMVLVTITGGSTNAVLHLIAMADAVGIKLTIDDFQAVSDRTPFLADLKPSGKYVFNDLYSIGGTPSLIKLLIKEGVIDGSGMTVTGKTLAENVKDVRDFPSDQEIIRPFSNPIKKSGHIQILRGSLAPGGSVGKITGKEGLRFVGKAKVYDAENDFIEALERGEIKKGEKTVVVIRYEGPKGGPGMPEMLKPSSAIMGAGLGKDVALITDGRFSGGSHGFLIGHIVPEAQVGGPIGLVRDGDTIVIDAETRVLDLEVEGGEEELERRRKEFVAPPLKYTKGTLAKYSRLVQDASHGCITDGEIVEA

SEQ ID NO: 447 - DNA, 1692 bp, Phaeosphaeria nodorum
atgtctctcgcacgctttggaggcgcactttcacgtcccaagtcgcagggcgcctcgcaggccatgctgtacgcgactggcatgagcgaggatgatatgaataaggcccaggtcggcatctcatcagtgtggtactcgggcaacccatgcaatatgcacctgatggacctcaacaacaaggtcaaagagggtgtgcagcgggctggtctcttgggcatgcagttcaacaccattggtgtgagtgacggcatttccatgggcaccaagggcatgcgctactcgctgcagtcgcgtgagatcatcgcagactcgattgagactgtcatgggcggccaatggtacgatgcgaacatttccatccccggatgcgacaagaacatgcccggtgtcatcatggctatgggccgtgtgaaccggccctcgctgatggtctacggcggaaccatccagcctggatgcgcaaagactctcgacaaccagtccatcgacatcgtctctgccttccaggcctacggacaattcataactggagagatcactgaagaccagcgcttcgatgtcatcagacacgcatgcaacggtcagggtgcttgtggaggcatgtacacggcaaacacaatggctactgccattgagaccatgggcatgtcgctgcccggctcatcgtcgaaccccgccaactcgcaggccaagatgctggaatgcctggctgcgggaggcgcaatcaagaacctgctcaaggaggacctgcgccccagcgacatcctcaccaggcaagcactcgagaacgccatggttgtcatcagcatcaccggaggctccaccaacgccgtattacacctgatcgccatcgccgactctgttggtctcaaactgaccatcgacgacttccagagcgtgagcgaccggattccgttgctcgctgatctcaagccctctggcaagtacgtcatggctgatgttcacgacatcgggggtactcccgcactgctcaagttcctgcttaaggagggcctgctcgacggcagccagatgactgtcactggcaagaccctaaagcagaacttggagaacgtcaaggacttcccctccgaccagaagatcatccgccctctcagcgagcccctcaagactaccggccatttgcaaattctccgtggtagtctcgcaccaggtggctgtgtcggcaagatcaccggcaaagaaggaaccatcttcaccggcaaagccaaatgctacgatgccgaagacgacttcatcagtgcgctcgagcgcggcgagatcaaaaagggcgagaagactgtcgtcgtcatccgctacgaaggccccaagggcgggcccggcatgcctgaaatgctcaagcccagctccgccatcatgggcgcaggtctcggcaaggatgtcgcactcatcactgacgggcgcttcagcggtggtagccacggtttcttgatcggccacattgtgcctgaagcgcaggagggcggaccgatcggtcttgtccaggatggcgatgagatcaccatcgactctgagtcgaatgaacttaacattggcgtgagcgagcaggagttggcggagcgcaggaagagctggaaggcgccggcgctgaagtatcaaaagggcacgctgttcaagtatgcgcggttcgtcaaggacgccagctcgggatgcgtgacggactcggcataa

SEQ ID NO: 448 - protein, 563 aa, Phaeosphaeria nodorum
MSLARFGGALSRPKSQGASQAMLYATGMSEDDMNKAQVGISSVWYSGNPCNMHLMDLNNKVKEGVQRAGLLGMQFNTIGVSDGISMGTKGMRYSLQSREIIADSIETVMGGQWYDANISIPGCDKNMPGVIMAMGRVNRPSLMVYGGTIQPGCAKTLDNQSIDIVSAFQAYGQFITGEITEDQRFDVIRHACNGQGACGGMYTANTMATAIETMGMSLPGSSSNPANSQAKMLECLAAGGAIKNLLKEDLRPSDILTRQALENAMVVISITGGSTNAVLHLIAIADSVGLKLTIDDFQSVSDRIPLLADLKPSGKYVMADVHDIGGTPALLKFLLKEGLLDGSQMTVTGKTLKQNLENVKDFPSDQKIIRPLSEPLKTTGHLQILRGSLAPGGCVGKITGKEGTIFTGKAKCYDAEDDFISALERGEIKKGEKTVVVIRYEGPKGGPGMPEMLKPSSAIMGAGLGKDVALITDGRFSGGSHGFLIGHIVPEAQEGGPIGLVQDGDEITIDSESNELNIGVSEQELAERRKSWKAPALKYQKGTLFKYARFVKDASSGCVTDSA

SEQ ID NO: 449 - DNA, 1758 bp, Pichia guilliermondii
atgttatctgctagagtacattctagactattttccacttcggtggtccgttgtgagaaagtgctcaacaagtactcttcgatcgtgacccaggataagtctcaaggtgcttcgcaagccatgttgtatgctacgggctttcaagatgaagatttcgataaggctcaaattggagttggaagtgtatggtggtcaggaaacccttgtaatatgcacttgatggacatgaacgacagatgtacagcttctgtgaacaaggctggattgaaaggaatgcaattcaattccattggagtttctgatggtatcaccaacggtactgatggtatgagatattcattacaatcgagagaaatcattgccgattcatttgagactttagtgatggcccagatgtatgatggtaacattgccattccatcgtgtgacaagaatatgcctggtactcttatggctatgggtagacacaatcgtccatcgattatggtttatggtggtactatcatgcctggatctccttcttgtggtggtgcaaatgttcctgagaagattgatatcattagtgctttccaatcttatggtcaatttttgagtggacagatcaatgaggaacaaagaaaggacattgtaagacatgcttgtccaggtgctggtgcttgtggtggtatgtataccgccaacaccatggcttctgctgctgaggtcatgggtatgtcacttccatactcttcttcagctcctgccatttcgaaagaaaaagctgatgagtgtgacaatgttggttatgccatgaaacatttattagaaattgatttgaaacccaaggatataatgactaaaaagtcctttgagaatgccatcacctacatcattgccactggtggttccacaaatgcggtgttgcacttgattgccattgctcattctgtgggtattgacttgactgttgatgacttccaacgtatttctgataccactccattgttggctgatttcagaccatctggtaaatacgttatggcagatcttcaacaatttggaggtactcctgcggtgatgaaattgttgttggaagaaggtttcctcgatggagaccagtacaccgtcaccggtaataccatcaaagaaaacttatcaaaggtcaagggattgccagccagtcaagacattgttcgtcctgtttctaacccattgaaaccaaatggacacttgcaaattctcaagggtactttagcaccaggaagtgccgttggtaagattactggtaaagaaggtacctactttaagggagctgccagagtgtttgacaatgaagaattgttcatcaaggctcttgaaaagggagagatcaagaagggagaaaagaccgtttgtgtgattcgttatgagggccctaagggtggtcctggtatgcccgaaatgttgaaaccttcttcagcattgatgggttatggtttgggtaaagacgttgcattgttgactgatggtaggttctctggtggttctcatggtttcttgattggtcacatcgtgccagaagccgccgagggtggcccaattgccttggttcacgacggagatgagattgtcattgatgctgaaaacaacaaaattgacttgcttgtctcggaagaaattctcgctgaaagaaagaagctgtggtctcctcctgctccaagatacacgagaggaaccttggccaagtactccaaattggttagtgatgcttccaccggttgtgtaactgacttggactaa

SEQ ID NO: 450 - protein, 585 aa, Pichia guilliermondii
MLSARVHSRLFSTSVVRCEKVLNKYSSIVTQDKSQGASQAMLYATGFQDEDFDKAQIGVGSVWWSGNPCNMHLMDMNDRCTASVNKAGLKGMQFNSIGVSDGITNGTDGMRYSLQSREIIADSFETLVMAQMYDGNIAIPSCDKNMPGTLMAMGRHNRPSIMVYGGTIMPGSPSCGGANVPEKIDIISAFQSYGQFLSGQINEEQRKDIVRHACPGAGACGGMYTANTMASAAEVMGMSLPYSSSAPAISKEKADECDNVGYAMKHLLEIDLKPKDIMTKKSFENAITYIIATGGSTNAVLHLIAIAHSVGIDLTVDDFQRISDTTPLLADFRPSGKYVMADLQQFGGTPAVMKLLLEEGFLDGDQYTVTGNTIKENLSKVKGLPASQDIVRPVSNPLKPNGHLQILKGTLAPGSAVGKITGKEGTYFKGAARVFDNEELFIKALEKGEIKKGEKTVCVIRYEGPKGGPGMPEMLKPSSALMGYGLGKDVALLTDGRFSGGSHGFLIGHIVPEAAEGGPIALVHDGDEIVIDAENNKIDLLVSEEILAERKKLWSPPAPRYTRGTLAKYSKLVSDASTGCVTDLD

SEQ ID NO: 451 - DNA, 1782 bp, Debaryomyces hansenii
atgagtgcattgacaaagtgtaaacgtaacttaggaggtagaaacatccggttattttccaattctgctttgaattgtgacaacaagttaaataagtactcttctattgtgacccagcccaagtcgcaaggggcatcccaagcgatgttgtatgcgaccgggtttgatgaagaagatatgaacaaggcacaggttggtgttggatctgtctggtggtcaggaaatccgtgcaacatgcacttgatggagatgaacaacaaggtgaccgaatctgttaacagagccggtttgaaggggatgcagttcaactcgattggtgtctcggatgggatcactaatggtactgatggtatgagatactcgttgcaatcgcgtgaaattattgctgactcgtttgagaccatgatgatggcccagatgtacgatgccaacatcgcaattccgctgtgtgacaagaacatgccaggtaccttgatggctatgggtagacacaacagaccatctattatggtttacggtggtactattatgccaggttctccaacttgtggtaactcgattattcctgacaagattgatatcatctctgcgttccaatcgtatggtcaattcttatcggaccagatcaatgagggcgaaagaaaggatatcattaagaatgcatgtcctggtgctggtgcatgtggtggtatgtacactgccaacaccatggcctctgctgctgaagttttaggtatgtccttaccattttcgtccagtgccccagccatttcgaaggaaaaggcacatgaatgtgctactgtcggtgatgccatcaagaatttgttagtccttgacttgaagccaatggatatcatgaccaagaaggcttttgaaaatgcaatcacttatattatcgctactggtggttctactaatgccgttttacatttgattgccatggcaaacaccgttggtgttgacttaactgtcgatgatttccaaagaatttcggactccactccattattagccgatttcaagccaagtggtaagtacgttatggctgacttacaaaagtacggtggtaccccagctgtcatgaagttgttattcgaggaaggtttaattgatggatctcaatatactgtcacaggtaagactatcaaagaaaatttggaatctgttaaaggcttgccagctgaacaagaaattgtcagacccttatctaacccattaaagccaagtggccacttacaaattttaaagggtactttagctccaggtagtgctgtcggtaaaattactggtaaggaaggtacttatttcaagggtaaatctagagttttcgatgatgaaatggcattcattactgctttagaaaatggcgaaatcaagaaaggtgaaaagactgtttgtgtcattagatacgaaggtcctcaaggtggccctggtatgccagagatgttgaagccttcttctgcattaatgggttacggtttaggccaagacgttgcgttattaactgatggtagattctctggtggctctcatggtttcttaattggtcatattgttccagaagctgcagttggtggaccaattgcgttagtgcatgatggtgatgaaattgttattgacgctgaaaacaatagaatcgacttattagtatctgaagatattttagccgaaagaaagaaggaatggaccccaccaaagccaagatatacaagaggtacattggctaaatattctaagttagtcagtgatgcttcgttgggttgtgttactgatttggtataa

SEQ ID NO: 452 - protein, 593 aa, Debaryomyces hansenii
MSALTKCKRNLGGRNIRLFSNSALNCDNKLNKYSSIVTQPKSQGASQAMLYATGFDEEDMNKAQVGVGSVWWSGNPCNMHLMEMNNKVTESVNRAGLKGMQFNSIGVSDGITNGTDGMRYSLQSREIIADSFETMMMAQMYDANIAIPLCDKNMPGTLMAMGRHNRPSIMVYGGTIMPGSPTCGNSIIPDKIDIISAFQSYGQFLSDQINEGERKDIIKNACPGAGACGGMYTANTMASAAEVLGMSLPFSSSAPAISKEKAHECATVGDAIKNLLVLDLKPMDIMTKKAFENAITYIIATGGSTNAVLHLIAMANTVGVDLTVDDFQRISDSTPLLADFKPSGKYVMADLQKYGGTPAVMKLLFEEGLIDGSQYTVTGKTIKENLESVKGLPAEQEIVRPLSNPLKPSGHLQILKGTLAPGSAVGKITGKEGTYFKGKSRVFDDEMAFITALENGEIKKGEKTVCVIRYEGPQGGPGMPEMLKPSSALMGYGLGQDVALLTDGRFSGGSHGFLIGHIVPEAAVGGPIALVHDGDEIVIDAENNRIDLLVSEDILAERKKEWTPPKPRYTRGTLAKYSKLVSDASLGCVTDLV

SEQ ID NO: 453 - DNA, 1794 bp, Lodderomyces elongisporus
atgagtttcgctagcaccacaagaaggtgttgcactagatcttttgcctcctccactgttcgtcatgaattagaaaagaaaccattgaaactcaacaagtactcttccgttgtcaccgaggacccttcccaaggagcatcgcaagcaatgctctacgccacagggttctcctccgaggactttaaccgtgcacaaatcggtgtcggatccgtttggtggaccggtaacccttgtaacatgcacttgatggagttaaacaatatgtgtgcagagtcagtcaacaaggccggtttaaaagcaatgcaattcaactcaattggtgttagtgatggtatcaccaacggtacagagggtatgaaatactcattgcaatcacgtgaaatcattgctgactcatttgaaacaatgaccatggctcaattatatgacggtaatgttgccatcccaagttgtgacaagaatatgcccggtgtccttatggcaatgggtagacacaatagacccgccattatggtgtacggaggtacaatcatgcccggctcaccaacttgcggtggctcaaagctgaatcccgccattgcagataagattgacattatcagtgctttccaaagttatggacaattcttgtccaaacaaatcaacgaggaagaaagaattgatattgtgaaaaacgcatgtcctggaccaggtgcttgcggtggtatgtacactgccaacactatggcctctgcagccgaagtcttgggtttaactttacctttttcatcatcggcaccagcagtttcaaaagaaaaggccgaagagtgtgccaacgttgggtacgccatcagaaacttgcttgaactcgacttgaaaccaagagacattttgaccaaaaaatcatttgaaaacgccatcacatacatcattgctaccggtggctcaacaaatgcagttttgcacatgattgccattgcttcaagcttcgatatcgaattaactgttgacgatttccaaagaatcagtgactctactccacttttggctgactttaaaccatctggtaaatacgttatggcagatttgcaagctattggtggtacaccagcagttatgaagtttttgatgaatgaaggtatgattgatggttcgcaattgactgtgacaggtaagaccattgctgaaaacttggccaatgttccagaattgccaaagggtcaagaaatcatccactcattggacaacccattgaaaccaagcggtcacttgcaaatcttgaaaggaaccttggccccaggctcagccgttgccaagattactggtaaagaaggtacttacttcaaaggtaaagctagagtttttgacgaggaacacgcatttatcactgcattggaaaatggcgagatcaaaaagggtgaaaagactgtttgtgtcattagatacgaaggaccaaaaggtggtccaggtatgccagaaatgttgaaaccatcaagtgctttgatgggatacggattgggacaagatgttgccttattgaccgatggtagattttctggtggttcacacggattcttgattggtcacattgtccccgaggcagccgaaggtggtccaattgctcttgttgaggatggcgatgagattgttattgatgccgacaagaacatcattgacttgttggtgagcgaagacgtcttggccaagagaagagagcaatggactccacctgaacccagatacaaaagaggtacattgttcaaatatgccaaattggttagtgatgcttccaaaggatgtgttactgacttgtaa

SEQ ID NO: 454 - protein, 597 aa, Lodderomyces elongisporus
MSFASTTRRCCTRSFASSTVRHELEKKPLKLNKYSSVVTEDPSQGASQAMLYATGFSSEDFNRAQIGVGSVWWTGNPCNMHLMELNNMCAESVNKAGLKAMQFNSIGVSDGITNGTEGMKYSLQSREIIADSFETMTMAQLYDGNVAIPSCDKNMPGVLMAMGRHNRPAIMVYGGTIMPGSPTCGGSKLNPAIADKIDIISAFQSYGQFLSKQINEEERIDIVKNACPGPGACGGMYTANTMASAAEVLGLTLPFSSSAPAVSKEKAEECANVGYAIRNLLELDLKPRDILTKKSFENAITYIIATGGSTNAVLHMIAIASSFDIELTVDDFQRISDSTPLLADFKPSGKYVMADLQAIGGTPAVMKFLMNEGMIDGSQLTVTGKTIAENLANVPELPKGQEIIHSLDNPLKPSGHLQILKGTLAPGSAVAKITGKEGTYFKGKARVFDEEHAFITALENGEIKKGEKTVCVIRYEGPKGGPGMPEMLKPSSALMGYGLGQDVALLTDGRFSGGSHGFLIGHIVPEAAEGGPIALVEDGDEIVIDADKNIIDLLVSEDVLAKRREQWTPPEPRYKRGTLFKYAKLVSDASKGCVTDL

SEQ ID NO: 455 - DNA, 1764 bp, Vanderwaltozyma polyspora
atgactattgcaagcaaggcattgagtgctagacacttttcagtcactagaaatgttagtaagaagttgaataagtactcttatatcgttacagaacctaaggaccaaggtgcatcacaagcgatgctttatgcaactgggttcaagaaagaagattttagtaaaggtcaagttggtgtaggatcatgttggtggtctggtaatccatgtaatatgcatttattggatcttaatgatagatgttcacgttctgtggagaaggctggcttgaaagctatgcaatttaataccattggtgtttccgatggtatttcaatgggtactaaaggtatgagatactctttacagagtagagaaatcattgctgattcttttgaaactataatgatggctcaacattacgatgccaatattgctatcccttcatgtgataaaaacatgccgggtgtcatgatggccatgggaagacataacagaccttctatcatggtttatggtggtactattttacctggccatccaacctgtggttcttcaaaaattccagaaaacattgatatagtatctgctttccaatcttatggtcaatatatatctaaacaattcagcgaacaagagagagaagatgtggttgaacatgcttgtcctggtccaggttcttgtggtggtatgtatactgctaacactatgggttctgtcgcagaagtgctaggtttgactttgccaaactcttctgccttcccagcagtttctcaagaaaagatgaatgaatgtgattccattggtgaagctattaagaagacaatggaattaggtatcactcctcgtgatatcatgactaagcaagcttttgaaaatgcaatcacctatgttatcgcaaccggtggttccaccaatgctgttttgcacttggttgccattgctcattctgctggtgtcaagattactcctgatgatttccaaagaatcagtgataagaccccattattgggtgattttaaaccatcgggtaaatacgttatggctgatttaatcaaagtaggaggtacccaatctgttatcaaattcttgtacgaaaacggtttcttgcatggtgatgccattactgttactggtgatacattagccgaacgtgctgccaaaacttctggattaccagaaggccaagatataatcagacctgtttcacaacctattaaaccaaatggccatctacaaatattgtatggctcattggctccaggtggtgctgtcggtaaaatcactggtaaagaaggtactttctttaaaggtagggctcgtgtttttgaagaagaagaagctttcattcatgcattggaaagaggtgaaattaagaaaggtgaaaaaaccgttgttgtcatcagatatgaaggtccaaaaggtggtccaggtatgccagaaatgttgaaaccatcctctgcgctaatgggttacggtttaggtaaagatgttgccttgttaactgatggtagattttctggtggttcccatggattcttaatcggtcacattgttccagaagctgccgaaggtggtccaattggtttagttaaagatggagacgaaattgttattgatacaaataacaacaagatagatttattagtatccgaacaagaaatagcccaacgtaaatcagagtgggttaaaccagctccacgttacaccagaggtactctatccaagtacagtaaattggtatctaacgcttctaacggttgtgtattagacgctgacaattga

SEQ ID NO: 456 - protein, 587 aa, Vanderwaltozyma polyspora
MTIASKALSARHFSVTRNVSKKLNKYSYIVTEPKDQGASQAMLYATGFKKEDFSKGQVGVGSCWWSGNPCNMHLLDLNDRCSRSVEKAGLKAMQFNTIGVSDGISMGTKGMRYSLQSREIIADSFETIMMAQHYDANIAIPSCDKNMPGVMMAMGRHNRPSIMVYGGTILPGHPTCGSSKIPENIDIVSAFQSYGQYISKQFSEQEREDVVEHACPGPGSCGGMYTANTMGSVAEVLGLTLPNSSAFPAVSQEKMNECDSIGEAIKKTMELGITPRDIMTKQAFENAITYVIATGGSTNAVLHLVAIAHSAGVKITPDDFQRISDKTPLLGDFKPSGKYVMADLIKVGGTQSVIKFLYENGFLHGDAITVTGDTLAERAAKTSGLPEGQDIIRPVSQPIKPNGHLQILYGSLAPGGAVGKITGKEGTFFKGRARVFEEEEAFIHALERGEIKKGEKTVVVIRYEGPKGGPGMPEMLKPSSALMGYGLGKDVALLTDGRFSGGSHGFLIGHIVPEAAEGGPIGLVKDGDEIVIDTNNNKIDLLVSEQEIAQRKSEWVKPAPRYTRGTLSKYSKLVSNASNGCVLDADN

SEQ ID NO: 457 - DNA, 1746 bp, Ashbya gossypii
atgatgtctcacaggcggttctcgacagcgcagcggctgcgcgaggggctaaacaggtactcgagggtcataaccgagccgcgggcgcagggtgcctcgcaggccatgctgtacgcgactggtttcggtgatggggactttgcaaaggcgcaggtcggagtggggtcgtgctggtggtcgggcaacccatgcaacatgcatctgatggacctgaataaccgggtagcggcgtctgtggaccgggcgggcttgaaggcgatgcagttcaacacaatcggtgtctcggacggcatttctatggggactaccggcatgcggtactcgctgcagtcgcgcgagatcattgcagactcttttgagaccatgatgatgggtcagcactacgatggcaacgtggcaattccctcctgcgacaagaacatgcccggcgtgataatggccatggcgcggcacaaccggccctccattatggtctacggcggcaccatcatggcggggtccccttgcagcggctctacgcggctgccaaagaagattgatgttgtatctgcgttccaggcgtacgggcaatatctgtcgaagcagattacggaggaggaaagcagggatgtcgtccgtcacgcctgtccgggtccgggctcttgcggtggcatgtacacagccaacacaatggcctcagccgccgaggttctgggactgactctgcccaactcgtctgcgttcccggcgatctccgaacagaagctggccgaatgtgacgccgttggggatgccatgcgcaaagcgctcgagctcaacatcaggccacgcgacctgctcacaagggaagccttcgaaaacgcgatcacgtacgtgattgcgactggtggctcgaccaacgcagtgctccacctggttgctattgcccactctgcgggcgtgaaactgacgccggatgacttccagcgcatttccaacaaaactccgttgctgggcgacttcaagccatccggaaagtacgtcatggctgacctcattgaggttgggggtacacaggccgtcatcaagtttttgtatgaaaatggcttcatgcacggagatgccctaacggtgacaggagacacgctcaaggagcgggctgcgaagactgctcccttgcccgaaggccaggacatcattcgtcccgtgtcgcagccattgaatcctaggggacatctccagattctctatggctctcttgcgccaggcggcgctgtcggcaagatcaccgggaaggaggggaccttcttccagggccgcgcacgcgttttcgatgaagaaaacgcattcatccgcgccctggaggagggccagatcaagaagggtgagaaaaccgttgtggtcatcaggtatgaaggccccaagggtgggcccggcatgccagaaatgctcaaaccgtcttccgcgctgatgggctacggtctgggcaacgatgttgccttgctgaccgacggccgcttctccggcggctcccacgggtttttgatcggccacattgtccctgaggcctatgaaggcggcccaattgcgctcgtgcaagacggtgacgacattgtcatcgacgccgagaacaatgccatcaacctccttgtgccaaaagaagaaattgagtcgcgccgcgctcgctggacccagccggctccacgctacaagaggggcacgctcgccacctattctaagttagtctccaacgcctccaagggttgtgtcttggacagcgacgactag

SEQ ID NO: 458 - protein, 581 aa, Ashbya gossypii
MMSHRRFSTAQRLREGLNRYSRVITEPRAQGASQAMLYATGFGDGDFAKAQVGVGSCWWSGNPCNMHLMDLNNRVAASVDRAGLKAMQFNTIGVSDGISMGTTGMRYSLQSREIIADSFETMMMGQHYDGNVAIPSCDKNMPGVIMAMARHNRPSIMVYGGTIMAGSPCSGSTRLPKKIDVVSAFQAYGQYLSKQITEEESRDVVRHACPGPGSCGGMYTANTMASAAEVLGLTLPNSSAFPAISEQKLAECDAVGDAMRKALELNIRPRDLLTREAFENAITYVIATGGSTNAVLHLVAIAHSAGVKLTPDDFQRISNKTPLLGDFKPSGKYVMADLIEVGGTQAVIKFLYENGFMHGDALTVTGDTLKERAAKTAPLPEGQDIIRPVSQPLNPRGHLQILYGSLAPGGAVGKITGKEGTFFQGRARVFDEENAFIRALEEGQIKKGEKTVVVIRYEGPKGGPGMPEMLKPSSALMGYGLGNDVALLTDGRFSGGSHGFLIGHIVPEAYEGGPIALVQDGDDIVIDAENNAINLLVPKEEIESRRARWTQPAPRYKRGTLATYSKLVSNASKGCVLDSDD

SEQ ID NO: 459 - DNA, 1704 bp, Laccaria bicolor
atgaaccggcacagcagggtggtcacccaacccaaagaccaaggtgctagtcaggccatgctgtatgctacggacggcatcaaaacggatgatgacttcaacaaagccatggtcggcgtcgccagcgtctggtacgagggtaatccatgcaataaacatctccttggtctgggtcaagaaatcaaagcttcacttacaaagtctggtatcataggctaccagtttggtaccgttggagtcagcgatgggatcagcatgggaacgcgcggcatgtcctactccctccaatcccgagacctgattgcagatcaagtagagaccgctgccggaggacaccatctcgacgggatggtcgtcgttcccggctgcgataaaaatatgcctggtgttctgatggcccttgggcgtctcaaccgccctggacttatggtgtatggtgggacaattcgtgccgggtcgtgtgaaggagcgccacagttggacatcgtgtccgctttccagtcctacggaaagtacctgcaggacggaaagacacccgaagcggaacgcgaacgatataataccgttcgacatgcctgcccaggaccaggcgcttgtggtggtatgtacacagcaaacactatggcaagtgcggcggaggcactggggatgacagtccccggatcatcatccttcccagccgaatccctggaaaaacacaacgagtgtgcttcgattgggaaagttatgtacaaccttcttgagaaaaacatacttccacgggatatcatgactagatccgcgtttgaaaatgctatggtcctcacgatgattctaggcggttccaccaatgcagttctccatctaatagctatggctcactccgtgggcattaaattggatatcgacgacttccaaaacgtgtcagaccgcacccccttcctcgccgacatcaaacccagtggcaaatatgtcatggaagatgtgtacaagatcggtggaatcccaaaaattttggcgttcttgctaaagaacaagctaatcgacggaaataatatgactgtcacgggtcgaaccctcggcgaaaaccttgaggaatggacacacagatacggcgaactggattctcgacaagacgttattcgacctctcaacaaacccataaaagagacagggcacatccgaatcctcaaaggcaatcttgctcctggcggtgcggtggctaagatcacaggcaaagaaggcttggaatttactggcaaggcacggactttcgacacagaagacgatttcgtcaaggccgtcgaaagcgggtctatcaaaaagggtgaaaaaacggtcgtcattcttcggtatctcggccctcagggaggacctggcatgcctgagatgctgaaacccacaagcttaatcatgggagccggcttgggattggacgttgcctgtctcacagatggaagattcagcggcggatcccatgggttttgtattggacacgtcgttcccgaggcacaggttggtgggcccatagcgctcgtcagggacggagacaccattgtcgtcgatgccatcaagaacactatcgagctccgcgtctcacccgaggagttaacgaagagaaaagagtcttggattccacctgccctcaaggtatcccagggaacgttgtacaagtatactaagagtgttacagacgcgagccatgggtgtgtgacggacgcatga

SEQ ID NO: 460 - protein, 567 aa, Laccaria bicolor
MNRHSRVVTQPKDQGASQAMLYATDGIKTDDDFNKAMVGVASVWYEGNPCNKHLLGLGQEIKASLTKSGIIGYQFGTVGVSDGISMGTRGMSYSLQSRDLIADQVETAAGGHHLDGMVVVPGCDKNMPGVLMALGRLNRPGLMVYGGTIRAGSCEGAPQLDIVSAFQSYGKYLQDGKTPEAERERYNTVRHACPGPGACGGMYTANTMASAAEALGMTVPGSSSFPAESLEKHNECASIGKVMYNLLEKNILPRDIMTRSAFENAMVLTMILGGSTNAVLHLIAMAHSVGIKLDIDDFQNVSDRTPFLADIKPSGKYVMEDVYKIGGIPKILAFLLKNKLIDGNNMTVTGRTLGENLEEWTHRYGELDSRQDVIRPLNKPIKETGHIRILKGNLAPGGAVAKITGKEGLEFTGKARTFDTEDDFVKAVESGSIKKGEKTVVILRYLGPQGGPGMPEMLKPTSLIMGAGLGLDVACLTDGRFSGGSHGFCIGHVVPEAQVGGPIALVRDGDTIVVDAIKNTIELRVSPEELTKRKESWIPPALKVSQGTLYKYTKSVTDASHGCVTDA

SEQ ID NO: 461 - DNA, 1797 bp, Coprinopsis cinerea
atgccgccaaaatatctcccaattcgtcgtcaatggctccggtcagcgagaggcttgtctacaaccgcacggtgcagtgacaagcccgtcctgaaccggtacagcaggatcatcacccagcccaaggaccagggagcaagtcaggctatgctctatgctacagatggcataaagtcggacgcggacttcaacaagccgatggtcggtgtcgccagcgtatggtatgagggcaacccatgcaacaagcaccttctcggacttggccaggaaatcaaggcttcccttaccgaggcagacatcataggctaccagtttggtacggtcggtgtcagcgacggtattagtatgggtacgaaaggaatgtcgtattccctccagtcgcgagacttaatcgctgaccaggtggaaactgctgccggaggtcatcatctcgatggcatggtagtagtccctgggtgcgacaagaatatgcctggtgttctcatggctcttggccgtctcaaccgaccaggtctcatggtctacggtggaaccattcgcgcaggctcgtgtgaaggcatgcctcaattggatatcgtttctgctttccaggcctacggaaaataccttcaagacggaaggacacccaaggctgaggaagaacgatacaacaccgttcgacacgcctgtcctggtcctggtgcttgcggtggcatgtacactgcaaacacaatggcaagtgcagcggaggctttgggaatgacccttcccggttcttcctccttcccagcgcagtcagaggagaaacatctagagaccaagtctatcggttctgtgatgtacaacttgcttgagaagaacattttgccgagggacatcatgacgcgctctgcctttgaaaacgcgatggtcctcaccgtcatcctcggaggctcaaccaacgcagtcctccatttgatcgccattgctcactcagtcggcatcaaactcgacattgacgacttccaaaaggtgtccgaccggatacccttccttgccgacttgaagcccagcggaaaatatgtcatggaagatgtctacaagatcggtggtatccccaaggttctcgcgttcttgctcaagaacaatttgatcgatggtaataacatgactgttactggtcgcactgtcggagagaacttggaccgatggacgcacaagtacggcgagctccacttcgacaagcaggatgtcatccgacctctggataagcctatcaaggagactggtcacatccggattttgaagggtaacctcgcccctggtggcgccgtcgccaaaatcaccggaaaagaaggccttggtttcgtcggcaaagcacgtgtatttgattctgagaacgacttcgtcaaggctgtggaatctggtagcatcaagaagggcgagaaaaccgttgttattttgcggtatctcggtcctcagggtggacctggaatgcccgagatgcttaagcctaccagtttggtgatgggcgctggattgggtatggatgtcgccatcttgactgacggacgatttagcggaggatcgcacggattctgtatcggacacgtcgttccggaagcgcaagtcggtggccctatcgccttggtcgaggacggcgacatcatctcggttgacgctgtgaagaacacgatcgagttgcaggtccctgaacccgagcttgccgcgcgaaaggctgcatggaaggcaccccctctcaaggtcacccagggcaccctctacaaatacgccaaggttgtcaccgatgccagccatgggtgtgtcactgatgcttaa

SEQ ID NO: 462 - protein, 598 aa, Coprinopsis cinerea
MPPKYLPIRRQWLRSARGLSTTARCSDKPVLNRYSRIITQPKDQGASQAMLYATDGIKSDADFNKPMVGVASVWYEGNPCNKHLLGLGQEIKASLTEADIIGYQFGTVGVSDGISMGTKGMSYSLQSRDLIADQVETAAGGHHLDGMVVVPGCDKNMPGVLMALGRLNRPGLMVYGGTIRAGSCEGMPQLDIVSAFQAYGKYLQDGRTPKAEEERYNTVRHACPGPGACGGMYTANTMASAAEALGMTLPGSSSFPAQSEEKHLETKSIGSVMYNLLEKNILPRDIMTRSAFENAMVLTVILGGSTNAVLHLIAIAHSVGIKLDIDDFQKVSDRIPFLADLKPSGKYVMEDVYKIGGIPKVLAFLLKNNLIDGNNMTVTGRTVGENLDRWTHKYGELHFDKQDVIRPLDKPIKETGHIRILKGNLAPGGAVAKITGKEGLGFVGKARVFDSENDFVKAVESGSIKKGEKTVVILRYLGPQGGPGMPEMLKPTSLVMGAGLGMDVAILTDGRFSGGSHGFCIGHVVPEAQVGGPIALVEDGDIISVDAVKNTIELQVPEPELAARKAAWKAPPLKVTQGTLYKYAKVVTDASHGCVTDA

SEQ ID NO: 463 - DNA, 1791 bp, Cryptococcus neoformans
atgctttcaagacgcatcgctactgcaagcccagccgctcatactagagcattccatgcgtcggctgccaaggcctcgaaagaggtcataatgaatcgttactctaggactattactcaacctaaggctcaaggcgcttctcaggccatgctttacgccacggaaggcattgtgaatgacgaagacttcaataaggccatggttggcgttgccagtgtttggtacgaaggcaacccatgcaatcgacacattttgggccttggccagagggtgaagaagtctcttatgaatgctggcatcgttggctaccaatttggtactgtcggtgtctctgacggtattagcatgggtacctctggaatgtcttactccctgcaatctcgtgacctcattgccgactctgttgagacggctgctggtggtcattggctggatgggatggtcgttttacctggttgcgataaaaacatgcctggtgctttgattgctctcggtcgacttaatcgacccagtatgatggtttatggcggtactatccgtcctggctcttgtggcggagaggtgctcgacattgtgtcagctttccagagttatggacgatacctccaagaaggccaaacacctgaggctgaaaagacccgctacaataccattcgaaacgcatgtcctggtcctggagcctgtggaggcatgtacactgctaacacaattgcgtccgcctccgaagccttgggtatgactcttcctgggtcgtcgtctttccctgcggaatatcctgaaaagcatgcggaatgtgacgctgttggcgagactatgcgcaaggttttggaagataaccttctccccagacaaatcatgaccaggcaggctttcgaaaatgcaatggctcttacaatggcgctcggtggatctaccaacgttgttctccatttgatcgccatcgctcggtcggttggtatcaaccttaccattgacgatttccaaacggtctccgatcgagtacctttgctggccgatctcaaacccagtggtaaatacgttatggaagacatcaacaccatcggtggcacgccttccgtcattcactatctgatcaaaaacggaattatgaccggtgacgagatgaccatcaccggtaagactcttggagagaattgtgatcgctgggtggaggagcacggtagcaagtgggaaggacagaagattttgcgacctattaacgatcctcttaagtccactggacacatccgaattctgcgcggtaatcttgcccctggaggtgctgtctctaagatcacaggcaaagaaggcttgcgctttaccggtaaatgccgggctttcgatgatgaggagggcttcgtgaaggccgtcgaaagcggttctatcaaaaagggagagaaaactgttgttgtcttgaggtaccttggccccaagggcggacctggtatgcctgaaatgctcaaacctaccagtttgatcatgggcgctggtctaggatatgatgtcgcttgtctgacagatggacgatttagcggaggttctcatggcttcgttgttggccatgtcgttccggaggcccaggttggaggacccattgctttggttcaagacggcgatgttattcatattgatgccgttgcgaacactttgtctgtggacgtatccgacgaagagatggcccgcagaaaggagaactgggttgcccctcctctcaaggtcactcacggaacattgctcaaatacgcccgagctgttaccgatgcttctcatggatgtgtcacggatgcttaa

SEQ ID NO: 464 - protein, 596 aa, Cryptococcus neoformans
MLSRRIATASPAAHTRAFHASAAKASKEVIMNRYSRTITQPKAQGASQAMLYATEGIVNDEDFNKAMVGVASVWYEGNPCNRHILGLGQRVKKSLMNAGIVGYQFGTVGVSDGISMGTSGMSYSLQSRDLIADSVETAAGGHWLDGMVVLPGCDKNMPGALIALGRLNRPSMMVYGGTIRPGSCGGEVLDIVSAFQSYGRYLQEGQTPEAEKTRYNTIRNACPGPGACGGMYTANTIASASEALGMTLPGSSSFPAEYPEKHAECDAVGETMRKVLEDNLLPRQIMTRQAFENAMALTMALGGSTNVVLHLIAIARSVGINLTIDDFQTVSDRVPLLADLKPSGKYVMEDINTIGGTPSVIHYLIKNGIMTGDEMTITGKTLGENCDRWVEEHGSKWEGQKILRPINDPLKSTGHIRILRGNLAPGGAVSKITGKEGLRFTGKCRAFDDEEGFVKAVESGSIKKGEKTVVVLRYLGPKGGPGMPEMLKPTSLIMGAGLGYDVACLTDGRFSGGSHGFVVGHVVPEAQVGGPIALVQDGDVIHIDAVANTLSVDVSDEEMARRKENWVAPPLKVTHGTLLKYARAVTDASHGCVTDA

SEQ ID NO: 465 - DNA, 1833 bp, Ustilago maydis
atgctgcgatccgccctcagtccctcagcacgttgcgtcctgcgcggcggcctcgcctcccgccgcgctctccacacctcctcagccgctctcaacacagagcgcgctccgccgggcgctctaaacaagtactcgcgtatcatcacccggcccaaggatcagggagcatcgcaagccatgctctacgccaccgacggcatccagtcggacgaggacctcacgcgtgctatggttggtatcggctcgatttggtacgagggcaacccatgcaacgcgcacctgctcgccatctcgcagcgcgtcaaaaagtcggtgcagcaagccggtctcaccggttatcagtttggatctgtcggtgtttcggatggtatctcgatgggtacagacgccatgtcgtactcgctcccgtcgcgtgatctgatcgctgactcggtggaatcggcttgcggtggtcattggcttgatggctgtgtggtgattcccggttgcgacaagaacatgcctggtgtgctgatggctctcggccgtctgaatcgtcccggaatcatgctctacggcggaacgatccgtcccggtggatgtgctagcgtcgagggcacgctcgacattgtctctgctttccagtcgtacggccagtacctcgccaacggaggctctccggctgctgaaaagattcgctatgacaccgtccgcaacgcctgtcccggtcccggtgcgtgcggtggcatgtacaccgccaacaccatggcttcatgcgccgaggctctcggcatgacgctcccaggtagctcgtcgttcccggcagaataccctgaaaagatcgccgaagccgaaaatatgggagccgccatgcgcctcgtcctcgaaaaggacatcaagccgcgcgacatcatgacgcgatccgccttcgaagatgcgatcgctctcaccatggttctcggaggcagcacgaatgcagtcttacatctgattgctgtcgctcactcggtcggcatcgagctcagcattgacgacttccagcgcatcgccgacgtgactccattccttgccgacctcaagccgtcgggcaagtacgtgatggaagatgttcactcgaaactcggcggtatcccgacgattattcagtactgcatcgagaacaagctgatgaagggtgaacacatgaccgtcaccggtcgaacgcttgccgagaacgtcgaccgatggacgcacgagcgcggcaaactgcctgcaggccaagacgtgctccgaccgatcgacaagcctctcaagagcaccggccacattcgaatcctcaagggcaatcttgcgcctggtggcgccgtcgccaagatcactggaaaagagggtctgcgattcacaggtaaagcgcgcgtctttgacaccgaagatgccatggttggcgccgttgaaaagggcgagatcaagaagggtgaaaagacagtgatcgtgttgcgctacaagggtcctaagggtggacctggtatgcccgagatgctcaaacctaccagtttgatcatgggcgctggtcttgggcaggatgtagcctgtttgaccgacggtcggttctccggtggaagtcacggtttcgtcatcggtcacgtcgttcccgaggcacaggtcggaggtccgatcggcctcgtaaaggatggtgatgtgatcagcatcgatgccgagaccaacacgttggagcttgtcggtgtatccgctgccgatctcgagtcccgaagagagtcgtggaagcctctaccgctcaaaccgaaatcgggccacctgctcaagttcgttcgtaacgttgccgatgcttcgcatggttgcatcaccgatatgtga

SEQ ID NO: 466 - protein, 610 aa, Ustilago maydis
MLRSALSPSARCVLRGGLASRRALHTSSAALNTERAPPGALNKYSRIITRPKDQGASQAMLYATDGIQSDEDLTRAMVGIGSIWYEGNPCNAHLLAISQRVKKSVQQAGLTGYQFGSVGVSDGISMGTDAMSYSLPSRDLIADSVESACGGHWLDGCVVIPGCDKNMPGVLMALGRLNRPGIMLYGGTIRPGGCASVEGTLDIVSAFQSYGQYLANGGSPAAEKIRYDTVRNACPGPGACGGMYTANTMASCAEALGMTLPGSSSFPAEYPEKIAEAENMGAAMRLVLEKDIKPRDIMTRSAFEDAIALTMVLGGSTNAVLHLIAVAHSVGIELSIDDFQRIADVTPFLADLKPSGKYVMEDVHSKLGGIPTIIQYCIENKLMKGEHMTVTGRTLAENVDRWTHERGKLPAGQDVLRPIDKPLKSTGHIRILKGNLAPGGAVAKITGKEGLRFTGKARVFDTEDAMVGAVEKGEIKKGEKTVIVLRYKGPKGGPGMPEMLKPTSLIMGAGLGQDVACLTDGRFSGGSHGFVIGHVVPEAQVGGPIGLVKDGDVISIDAETNTLELVGVSAADLESRRESWKPLPLKPKSGHLLKFVRNVADASHGCITDM

SEQ ID NO: 467 - DNA, 1770 bp, Malassezia globosa
atgtcgacgacatgtgcttgcaccacagcaaagaaggatcgcccagcaccaggtgatctgaatcggtactcgcgcttgataacgcaaccaaaagatcagggtgcatcacaggcaatgttgtatgccacgcacggaatccagtcagatgaggatttacgacgtgccatggttggcgtggccagtgtctggtacgaaggcaacccatgcaacgcgcacttgctgggcgttggacagcgaattcgagattctctcgacagggccggcctgacaggctaccaatttggcacagtcggcgtgtctgacggtattagcatgggaaccagtgccatgtcgtactcgcttccgagtcgggatctcattgccgacagcgttgaaagctgcatgggtggccattggcttgatggatgtgttgtggtgccagggtgtgacaagaacatgccgggtgtgctcatggcacttggccgtctgaatcgtccaggcattatggtatatggtggcacgattcgccctggccactgcggatcgatcacaggtacacttgacattgtgagcgcgttccagagttacggacagtacctggcatcaggcggcacgcccgatgccgaaaagatccgctacgacactgtacgtcatgcgtgcccaggaccaggtgcttgcggtggtatgtacacggccaataccatggcatcatgtgcagaggtgctgggtatgacactacccggcagtagctctttccctgccgaatacaacgagaagaaggccgaatgtgacagtattgggccaacgatgcgcatgctgcttgagaagaacattcgcccgcgagatattatgacgcgcagcgcattcgaagatgcaatggtacttacgatggtgctgggtgggtcgacgaatgctgtattgcacctgctcgccatggcccgaagcgtgggcgtagacctatctatcgatgacttccaacgcgtgagtgattcaactccgttccttgccaatctgaagccaagtggccagtacgtcatggaagacgtacacaccgtactgggcggcattccttccgttgtacactacttgattgagaacaaactcatgaaaggtgagcacatgactgtaacgggtcgaacactgcgtgaaaactgtgagcaatgggttgcagagcgcggtcccatgcccaaggaccaagatgttctccgccccatcgacaagccgatcaagcgtacaggccacatccgtgttctttacggcaacctagctcccggtggtgctattgccaagatcacaggcaaggaaggtctcgaatttacagggaaagcacgcgtatttgacacggaagatgacatggtgcatgctgtcgagcaagggacgatcaaaaagggcgagaagactgtggtgatacttcgctacaaaggtcccaagggcggtccagggatgcctgaaatgctcaagccaacgagtttgatcatgggcgcaggtctcggtcacgacgttgcttgcctcacagacggccgctttagcggcggttcgcacggcttcgtgattggacatgtcgttcccgaagcacaagagggtgggccgattgcccttgtgcgggatggcgatgaaatcactatcgatgcggtgaacaactcgatccagatcaacaatgtctcagacgaggagctcgcgcagcgccgcgccgcttggcaaccccggcctcttacagtcaaccagggcggcttgtataaatacacgcgactcgtatcaaacgcaagtcagggctgtgtgacagatgcatga

SEQ ID NO: 468 - protein, 589 aa, Malassezia globosa
MSTTCACTTAKKDRPAPGDLNRYSRLITQPKDQGASQAMLYATHGIQSDEDLRRAMVGVASVWYEGNPCNAHLLGVGQRIRDSLDRAGLTGYQFGTVGVSDGISMGTSAMSYSLPSRDLIADSVESCMGGHWLDGCVVVPGCDKNMPGVLMALGRLNRPGIMVYGGTIRPGHCGSITGTLDIVSAFQSYGQYLASGGTPDAEKIRYDTVRHACPGPGACGGMYTANTMASCAEVLGMTLPGSSSFPAEYNEKKAECDSIGPTMRMLLEKNIRPRDIMTRSAFEDAMVLTMVLGGSTNAVLHLLAMARSVGVDLSIDDFQRVSDSTPFLANLKPSGQYVMEDVHTVLGGIPSVVHYLIENKLMKGEHMTVTGRTLRENCEQWVAERGPMPKDQDVLRPIDKPIKRTGHIRVLYGNLAPGGAIAKITGKEGLEFTGKARVFDTEDDMVHAVEQGTIKKGEKTVVILRYKGPKGGPGMPEMLKPTSLIMGAGLGHDVACLTDGRFSGGSHGFVIGHVVPEAQEGGPIALVRDGDEITIDAVNNSIQINNVSDEELAQRRAAWQPRPLTVNQGGLYKYTRLVSNASQGCVTDA

SEQ ID NO: 469 - DNA, 1824 bp, Aspergillus clavatus
atggatgcctccaaccccgcgctgtccagcacatccgaagcaaaatatatcaacttccccagtcttcccgatgacgcaaaacacgacgacggcacgcttgcgctgaatagatactcgtcctatatcactcgcggccatgacttccctggtgcccgggcaatgctgttcgcggcgggtatcccagatcgcgatgccatgacaaagagcccccaggttggtgttgccagtgtctggtgggagggaaacccgtgcaacatgcacctgttggatttgggcaagacggtcaagaaagccgtcacggagcagggcatgatcggatggcagtataacacgattggggtttcggatgggattacgatgggtagtgatgggatgcgattttctctgcagacgcgcgagatcatcgccgatagtgtcgagacagtgacatgtgcgcagtaccatgatgcctgtattgccatccctggatgtgacaagaacatgcctggcgtggtgatgggcatggcacggcacaatcggccgtcgatcatgatctacggtggcacgattcagatcggctattccaatctcctgcggaagcctatcaacgtgtcgtcttgtttcgaggccgcgggcgcatatgcatacgacactttgcgccaaccggacgacggaggcgataccagcaagaccaaggatgagatcatggatgacctggagagacacgcgtgccccacggcaggcgcctgcggaggcatgttcacggcaaacacgatggccacggcgatcgagtcgatggggctgtctctgcccggatcatcgtcgacacctgcgtcgtcgccatcgaagatgcgggagtgcgtcaaggcggctgaagccatcaaggtctgcatggagaagaacatcaagccccgagatctgttgaccaagcggtcatttgagaacgccctggttatgaccatggcgctgggcggaagcaccaatggtgtcttgcatttcctcgccatggccaggacggccgaggtggatctcaccttggatgatatccagcgagtgagcaataagatccccttcatcgcggatctggctccgagcgggaagtactacatggcggacctgtatgatatcggaggcattccgtctgtgcagaagctgctgatcgcagcgggtctcctcgacggcgatatccccacagtcactggcaagacgttggccgagaacgttgcctccttcccatcgctgcctcaagatcaagtcatcattcgccctctcgataagcccatcaaggcgactgggcacctgcagatcttgcgcggaaacctggcacctggaggagcagtcgccaagatcaccggaaaggagggaaccaaattcacaggcaaagcccgtgtctttaataaggagcatcaattgaacgatgctgtgacccagggcaaaattcctcgtggcgagaacctggtgcttattgtccgttacgaaggccccaagggcggaccgggtatgccggaacagctcaaagccagtgcagcgctcatgggagccaagctcaacaacgtggcgctgatcacagatgggcgatactcaggagccagtcacgggttcatcgtcggccatattgtccccgaagctgcagttggcggaccgattgctgttgtccgtgacggcgatgtgattaccatcgatgcggagaccaacaccatcagcatggatgtttcggacgaggagattcgacagcgtctgaaggaatggaagcccccaacgccccatgtcacacgtggcgtactagccaagtatgccaggctggttggagatgcctctcatggcgcgatgacggatctattctag

SEQ ID NO: 470 - protein, 607 aa, Aspergillus clavatus
MDASNPALSSTSEAKYINFPSLPDDAKHDDGTLALNRYSSYITRGHDFPGARAMLFAAGIPDRDAMTKSPQVGVASVWWEGNPCNMHLLDLGKTVKKAVTEQGMIGWQYNTIGVSDGITMGSDGMRFSLQTREIIADSVETVTCAQYHDACIAIPGCDKNMPGVVMGMARHNRPSIMIYGGTIQIGYSNLLRKPINVSSCFEAAGAYAYDTLRQPDDGGDTSKTKDEIMDDLERHACPTAGACGGMFTANTMATAIESMGLSLPGSSSTPASSPSKMRECVKAAEAIKVCMEKNIKPRDLLTKRSFENALVMTMALGGSTNGVLHFLAMARTAEVDLTLDDIQRVSNKIPFIADLAPSGKYYMADLYDIGGIPSVQKLLIAAGLLDGDIPTVTGKTLAENVASFPSLPQDQVIIRPLDKPIKATGHLQILRGNLAPGGAVAKITGKEGTKFTGKARVFNKEHQLNDAVTQGKIPRGENLVLIVRYEGPKGGPGMPEQLKASAALMGAKLNNVALITDGRYSGASHGFIVGHIVPEAAVGGPIAVVRDGDVITIDAETNTISMDVSDEEIRQRLKEWKPPTPHVTRGVLAKYARLVGDASHGAMTDLF

SEQ ID NO: 471 - DNA, 1827 bp, Neosartorya fischeri
atggactcctctacctccacgtcgtccaacacccagggcgaagccaagtatatcaacttccccagtcttcctgacgacgcaaagcatgaagatggcacccctgcgctgaacagatattcttcttatatcactcggagccatgactttcctggtgctcgggctatgctttttgcagcgggaattccggatcgcgaagcgatggctaagagtccacaggtgggaattgccagtgtctggtgggagggaaatccttgcaatatgcacctgctggacttgggcaagacggtgaagaaggccgttacggatcagggcatgaccggttggcagtataataccattggagtttcagatgccatttcaatgggtagtgagggcatgagattttctctccagtcgcgtgagatcattgcagacagcgtcgagaccgtgacttgtgcgcagtatcatgatgcatgcattgctattcctgggtgcgacaagaatatgcctggagtggtgatgggtatggcgagacacaatcggccttcgcttatgatttacggtggaacaattcaaattggatactcgaacctgctgcgaaagcgggtcaacgtgtcaacttgctttgaagcggctggtgcctatgcctacgatactttgcgtcaaccggacgatgggggtgacaccagtaaaagcaaggacgagattatggatgacattgagagacatgcttgtcccagtgcgggcgcatgtggaggcatgtttactgcaaacacaatggccacggcgattgagtccatgggcctgtccctaccagggtcatcatcaacgcctgcctcgtctccatcgaagatgcgagaatgtgttaaagcggcagaagccatcaagatctgtatggagaagaacattaagcctcgggatcttttgaccaagcgctccttcgagaacgccctcgtcatgacgatggctctgggaggaagtaccaatggtgtcttgcacttccttgccatggctcggacggcggatgtgaacctgaccctagatgatatacaacgggtcagcaacaagatcccattcattgctgacttggcccccagtgggaagtactacatggcagacctgtacgatattggagggatcccgtctgtgcagaagttgctgatcgcagcgggccttcttgacggcgacatccccacggtcaccggcaagaccttggctgagaatgttgcatctttcccatctctacctcaggaccaagtcatcatccgccccctggacaacccaatcaagacgactggccacctgcagattctacgtggaaacctggcgcctggtggagcggtggccaagatcactggcaaggagggcaccaagttcacaggcaaagcacgtgttttcaataaagaatttcagctcaacgatgctctgacccaaggcaagattcctcgaggcgaaaacctggtgctcatcgtccgctacgaaggacccaagggtggaccaggcatgccggagcagctcaaagcgagtgcggcgctgatgggagctaagctcaacaatgtggccctaatcacagatggaagatattcaggggctagtcatggattcatcgtgggtcatatcgtcccagaagctgcggccggaggacccattgccattgttcgcgatgatgatgtgattaccatcgatgcggaaaccaacacaataaacatgcatgtctcagatgaggaaatccagcagcgactgaaagagtggaagcccccagtgcctcatgtcacacgtggtgtactcgccaagtatgcaaggctggttggggacgcctctcatggtgcaatgacggatctgttctag

SEQ ID NO: 472 - protein, 608 aa, Neosartorya fischeri
MDSSTSTSSNTQGEAKYINFPSLPDDAKHEDGTPALNRYSSYITRSHDFPGARAMLFAAGIPDREAMAKSPQVGIASVWWEGNPCNMHLLDLGKTVKKAVTDQGMTGWQYNTIGVSDAISMGSEGMRFSLQSREIIADSVETVTCAQYHDACIAIPGCDKNMPGVVMGMARHNRPSLMIYGGTIQIGYSNLLRKRVNVSTCFEAAGAYAYDTLRQPDDGGDTSKSKDEIMDDIERHACPSAGACGGMFTANTMATAIESMGLSLPGSSSTPASSPSKMRECVKAAEAIKICMEKNIKPRDLLTKRSFENALVMTMALGGSTNGVLHFLAMARTADVNLTLDDIQRVSNKIPFIADLAPSGKYYMADLYDIGGIPSVQKLLIAAGLLDGDIPTVTGKTLAENVASFPSLPQDQVIIRPLDNPIKTTGHLQILRGNLAPGGAVAKITGKEGTKFTGKARVFNKEFQLNDALTQGKIPRGENLVLIVRYEGPKGGPGMPEQLKASAALMGAKLNNVALITDGRYSGASHGFIVGHIVPEAAAGGPIAIVRDDDVITIDAETNTINMHVSDEEIQQRLKEWKPPVPHVTRGVLAKYARLVGDASHGAMTDLF

SEQ ID NO: 473 - DNA, 1827 bp, Aspergillus oryzae
atggatccctccaaccccgccgtctccgcaacctttggggaagcgaaatacatcgaattcccctgtcttccagaggggacgaagcatgaggatggaacacctgcactgaatcgctactctgcaaccatcactagaggccatgacttccctggcgctaaggcaatgctctatgcagcaggtgttcccgaccaaaacgctatggcaaagagtcctcaggtaggagttgcatctgtgtggtgggaaggaaatccgtgtaacatgcacctgctggatatgggcaagacggtaaagaaggccgtcgagggccagggcatgattggttggcaatataacaccattggtgtttcagatgccatcaccatgggcagtgaaggcatgcggttttctctccaaacgcgtgagatcattgcagatagtgtcgagactgtgacttgtgctcagtaccacgatgcctgcattgccatccccggatgcgacaagaacatgcctggagtggtgatgggtatggccaggcataaccggccctccatcatgatctacggcgggactattcagattgggtattccaacctcctacgaaagccaattaacgtttcgagttgcttcgaagccgctggggcttactcatatgatactttgcgtcaaccggacgacggtggagacaccagcaagaccaaggatgagatcatggatgatcttgaaagacatgcctgtcccagcgcgggcgcatgtggaggcatgttcactgcgaacacaatggccacagctatcgagtcgatgggtctgtctttgcctggctcctcttccacccccgctacatctccatcaaaaatgcgagagtgtgtcaaggtggcggaagcgattaaagtttgcatggagaagaatataagaccgcgtgatcttttgactaagcggtcattcgaaaatgccctcgtcatgacgatggctcttggaggaagcaccaacggtgtgctccacttccttgccatggctcggacagctggcgtggaacttactttagatgatattcaaagggtcagtaacaagatcccattcattgctgacctttcccccagtggaaaatactacatggcggacttgtacgatattggcggggtaccgtctgtccaaaagctgttgattgcagggggcctgcttgatggcgatattccaacagttaccggaaagactctggccgagaacgtggcatcattcccatcgttaccggacgatcaggttattattcgtcctttggacaaccctattaaggcgactggccaccttcagatcctccgtggaaacctagcccccggaggcgctgtggccaagatcaccggcaaggagggcactaaatttataggaaaggcacgagtgtttgataaggagtatcaactcaatgatgcactcaaccagggtaaaataccccgagatgagaatttagtgatcatcgtccgttatgagggccccaagggcggaccgggaatgccggaacagctcaaggccagcgcggcattgatgggagccaagcttaccaacgtggcactgatcactgatggaagatactcaggggcaagtcatgggttcatcgtcggccatatcgtacccgaagccgcggtaggaggaccaatcgctgttgtccgcgatggggacgtggtcacaattaatgcggaaaccaacgaaattagcatggatgtctcggatgaagaaatccagcaacggctgagagagtggcaacctcccgcaccgcacgttacacgcggtgtgctggccaagtatgctcggctggttggtgacgcttcccacggcgcaatgacggaccttttctag

SEQ ID NO: 474 - protein, 608 aa, Aspergillus oryzae
MDPSNPAVSATFGEAKYIEFPCLPEGTKHEDGTPALNRYSATITRGHDFPGAKAMLYAAGVPDQNAMAKSPQVGVASVWWEGNPCNMHLLDMGKTVKKAVEGQGMIGWQYNTIGVSDAITMGSEGMRFSLQTREIIADSVETVTCAQYHDACIAIPGCDKNMPGVVMGMARHNRPSIMIYGGTIQIGYSNLLRKPINVSSCFEAAGAYSYDTLRQPDDGGDTSKTKDEIMDDLERHACPSAGACGGMFTANTMATAIESMGLSLPGSSSTPATSPSKMRECVKVAEAIKVCMEKNIRPRDLLTKRSFENALVMTMALGGSTNGVLHFLAMARTAGVELTLDDIQRVSNKIPFIADLSPSGKYYMADLYDIGGVPSVQKLLIAGGLLDGDIPTVTGKTLAENVASFPSLPDDQVIIRPLDNPIKATGHLQILRGNLAPGGAVAKITGKEGTKFIGKARVFDKEYQLNDALNQGKIPRDENLVIIVRYEGPKGGPGMPEQLKASAALMGAKLTNVALITDGRYSGASHGFIVGHIVPEAAVGGPIAVVRDGDVVTINAETNEISMDVSDEEIQQRLREWQPPAPHVTRGVLAKYARLVGDASHGAMTDLF

SEQ ID NO: 475 - DNA, 1827 bp, Aspergillus niger
atggaccccgccaaacctgccgtgtcatccactttgggggaggccaagtaccttgaatttccctgcgtaccagagggcacaaaacacgaagatggtacccccgtcttgaaccgttggtcttctactatcaccaggggccatgagttccctggcgcgaaggctatgctctacgcggcaggcatccccgatcacaatgccatgacgaagagtccccaggttggtgttgcgtctgtgtggtgggaaggcaacccttgcaacatgcacttgttggacctggccaagacggtgaagaaggcgatcacggaccaaggcatgatcgggtggcagtacaatactattggtgtgtcggatgcgattggcatggggagtgaaggtatgcgattttctctccaaacccgtgagatcattgcagacagtgtggagtctgtaacgtgcgctcaataccatgacgcctgcattgccatccccggatgcgacaagaacatgcctggtgtggtgatgggtatggcgagacacaatcggccctcgatcatgctctacggtggtactatcgaggttgggtattcccagcttcttcggaagcgggtaagcgtttcgacgtgcttcgaagcggctggtgcctacacatataacactctccgtcagccggatgacggaggtgataccagcaagaccaaggacgagatcatggatgatctggagaggcatgcctgcccgagcgcgggagcgtgtggtggtatgttcacggccaacaccatggctacggccattgagtccatgggtctctccttgcccggctcgtcttctacgcctgcatcttccccaactaagatgcgtgagtgtgtcaaggcagctgaagccatcaagatttgcatggagaagaacatccgtcctcgggatctgttgaccaagcgggcgttcgagaatgccctggtcatgactatggccctgggaggtagcaccaatggtgtgcttcacttcctggctatggcccgcactgccggcgtggaccttactctggacgacgttcagcgggtcagcaacaagatccctttcattgcggacctgtcccctagtgggaaatactacatggcggacctctacgaagtcggaggcatcccgtcggttcagaagttgttgatcgcagctggtctgctcgacggcgatatccccaccgtgaccggcaaaactctggcccagaacgtcgcatcgcacccatctctgtctgctgaccaggtcatcatccgtcccctggataaccctatcaaggcgacgggccacctccagatcctgcgaggtaaccttgcacccggtggtgcggttgctaagattaccggcaaggaagggctccggttcacgggtaaggcgcgcgtgtttgacaaggagcatcagctcaacgaggccctgaaccagggcaagatccctcacggcgagaacctggttatcgtagttcgttacgagggcccgaagggtggcccgggaatgccggaacaactgaaggccagtgcagcgctcatgggagccaagctcaccaacgtggcactgattacggacgggcggtactctggcgctagtcacggattcattgtggggcatattgtccctgaagctgctgtaggaggacccattgccgttgttcgggacggcgatgtgatcacaattgatgccgaatcgaacgccatcaccatggatgtatcggatgaggaggtgcagcagcgtctgcgggagtggaagcccccggcaccgcatgtcacacgaggtgtgctggccaaatatgcccggttggtgggagatgcctcgaacggagccatgacggatctattttag

SEQ ID NO: 476 - protein, 608 aa, Aspergillus niger
MDPAKPAVSSTLGEAKYLEFPCVPEGTKHEDGTPVLNRWSSTITRGHEFPGAKAMLYAAGIPDHNAMTKSPQVGVASVWWEGNPCNMHLLDLAKTVKKAITDQGMIGWQYNTIGVSDAIGMGSEGMRFSLQTREIIADSVESVTCAQYHDACIAIPGCDKNMPGVVMGMARHNRPSIMLYGGTIEVGYSQLLRKRVSVSTCFEAAGAYTYNTLRQPDDGGDTSKTKDEIMDDLERHACPSAGACGGMFTANTMATAIESMGLSLPGSSSTPASSPTKMRECVKAAEAIKICMEKNIRPRDLLTKRAFENALVMTMALGGSTNGVLHFLAMARTAGVDLTLDDVQRVSNKIPFIADLSPSGKYYMADLYEVGGIPSVQKLLIAAGLLDGDIPTVTGKTLAQNVASHPSLSADQVIIRPLDNPIKATGHLQILRGNLAPGGAVAKITGKEGLRFTGKARVFDKEHQLNEALNQGKIPHGENLVIVVRYEGPKGGPGMPEQLKASAALMGAKLTNVALITDGRYSGASHGFIVGHIVPEAAVGGPIAVVRDGDVITIDAESNAITMDVSDEEVQQRLREWKPPAPHVTRGVLAKYARLVGDASNGAMTDLF

SEQ ID NO: 477 - DNA, 1773 bp, Aspergillus terreus
atggacccctcgactcccgccgtgtcgtccaccatgggcgaggccaaatacatcgaatttcccagtctccccgacgacgcaaaacaccccgatggcacccccgcgctgaaccgctactcaacaaccatcacgagaggccatgactttcccggtgcgaaggccatgctgtatgcggccggcatcccggaccaggaaaccatggccaaagcgccgcacgtcggaatcgcctcggtctggtgggaggggaacccgtgcaacatgcacctgttagatctgggaaagacggtgaagaagtcggtggacgcacagggcatgatcggatggcagtacaacaccattggtgtgtcggacgccattaccatgggcagcgagggaatgcgcttctcgctgcagtcccgcgagatcatcgcggacagcgtcgagacagtcacctgcgcgcagtaccacgacgcgtgcatcgccatccccggctgcgacaagaacatgccgggcgtggtgatgggcatggcgcggcacaatcggccgtcgatcatgatctacggcggcacgatccagatcggctactccaacctgctacgcaagccgatcaacgtgtcgacgtgctttgaggcggcgggcgcctatgcctacgacacgctgcggcagccggacgacggcggcgacacgagcaagaccaaggacgagatcatggacgagctggagcagcacgcgtgcccgagcgcgggcgcgtgcggcggcatgttcacggccaacacgatggcgacggcgatcgagtcgatggggctgtcgctgcccgggtcgtcgtcgacgccggcgtcgtcgccggccaagatgcgcgagtgcgccaaggccgccgacgccatcaagcggtgtctggcgctgaacctccggccgcgcgacctgctcaccaagcgcgcggggcgcccccccgggggtggccccccccctttgagggacatcccagggggtgaggcgaccgcattcccttcattggccaccttttggcccaaggggcaaagttactccatgggcagatctgttcggagattcgggggcgtgcggtccgtgcaggaggttgtttattcgcagccggcctgcttgacggcgccatccccacggtcacgggcaagacccctcgccggagaacgtggcctcggtggccgtccctgcccgccgacccaggtcatcatccgcccgctcgacaaccccatcaagccgacgagccatctgcagattctgcgcggcaacctggcccccggcggcgccgtcgccaagatcaccggcaaggagggcacgcgcttctcgggcaaggccctcgtcttcgacaaggagtaccagctcaacgacgccctgaaccagggccagattccccgcggcgagaacatcgtcatcgtcgtccgctacgagggccccaagggcgggcccggcatgcccgagcaactcaaggcgagcgccgccctgatgggtgcgaagctcaccaatgtggccctgatcaccgatggtcggtactcgggcgcgagccatggcttcatcgtcggccatattgtccccgaggccgcggtgggtggccccattgcggtcgtccgcagcggtgatgtgatcacgattaatgcggaaaccaacgagatcaccatggatgtctcggacgaagagatccagcagcgtctgaaggagtggaagcccccagcacctcatgtcacgcggggcgtgttggccaagtatgcccggttggtgggagatgcttcgcacggtgccatgaccgacctgttttag

SEQ ID NO: 478 - protein, 590 aa, Aspergillus terreus
MDPSTPAVSSTMGEAKYIEFPSLPDDAKHPDGTPALNRYSTTITRGHDFPGAKAMLYAAGIPDQETMAKAPHVGIASVWWEGNPCNMHLLDLGKTVKKSVDAQGMIGWQYNTIGVSDAITMGSEGMRFSLQSREIIADSVETVTCAQYHDACIAIPGCDKNMPGVVMGMARHNRPSIMIYGGTIQIGYSNLLRKPINVSTCFEAAGAYAYDTLRQPDDGGDTSKTKDEIMDELEQHACPSAGACGGMFTANTMATAIESMGLSLPGSSSTPASSPAKMRECAKAADAIKRCLALNLRPRDLLTKRAGRPPGGGPPPLRDIPGGEATAFPSLATFWPKGQSYSMGRSVRRFGGVRSVQEVVYSQPACLTAPSPRSRARPLAGERGLGGRPCPPTQVIIRPLDNPIKPTSHLQILRGNLAPGGAVAKITGKEGTRFSGKALVFDKEYQLNDALNQGQIPRGENIVIVVRYEGPKGGPGMPEQLKASAALMGAKLTNVALITDGRYSGASHGFIVGHIVPEAAVGGPIAVVRSGDVITINAETNEITMDVSDEEIQQRLKEWKPPAPHVTRGVLAKYARLVGDASHGAMTDLF

SEQ ID NO: 479 - DNA, 1827 bp, Coccidioides immitis
atggcttctcaagctcctattgcgcaagatggaccaaacgaggaggcgaaatatatcgacttcccctgtcttcctgatgatgcgatgcgggacggaaaaccggccttgaacaaatattctcagttcattacaaaaggtcatgattacccaggtgcccaggcaatgttatatgctgctggggtacctgatagggatgccatgaaaacgagtcctcatgttggcattgcatcagtatggtgggaaggaaatccctgcaacatgcacttgttggatttaggaaagactgtgaaaaaggctgttatagatcagggcatgctgggatggcaatacaataccattggtgtctctgacgcaatcacaatgggtcatgaaggcatgcgcttttctctgcagtctcgtgagatcattgccgacagcatcgaaactgtgacttgcgcacaataccatgacggttgcattgccatacctggttgtgacaagaacatgcctgggtgtattatggccatgggaagacacaaccgcccctccctgatgatatacggtggtacaattcaaggcggatattcgaaactattgcgacgacccattaacgtttcgacctgctatgaggccgcgggtgcttatgcgtataatactttagtccagccggacgatgggggggacaggagcaaaactaaggatgagatcatggaagacattgaaagacatgcttgtccgagcgctggggcttgcgcaggcatgtatactgcgaacacaatggccacagcaattgagtcgatgggtctgactctgcctggttcatcttctacccccgcaacatcaccagcgaagatgcgagaatgtgtaaaagcggctgatgcaattaaattgtgcatggagaggaacatcagaccgcgcgacttattgacaaaacggtcctttgagaatgccctggtcatgacaatggctctcggtggaagcactaacggcgttgttcatttcattgccatggctagatcggctggtgttcacttaatgctagatgacatccagcgtgttagtgacaaaattccttttatcgcgaacctcgccccaagcggaaaatattacatggcagatctatacgaaattggaggcattccatccgtccagaaattgcttgtcgccgcaggccttttagatggcggtattcccacggtgactggaaagacattggcggagaacattgcatctttcccctccctcccacaagaccaagctatcattcacccacttgacaacccgatcaagtcaaccggccatctccaggtgctcaggggaaaccttgcccctggcggtgctgtcgctaaaattaccggaaaagaaggtactaaatttacgggaaaggctcgcgtatttaacaaagagcacgagttggacgccgctctaagccgtggcgagattccacgcggagataacctcgtcctcgtcgttcgatatgagggaccaaagggtggtcccggaatgccggaacaactcaaagctagtgctgccttgatgggagctaaactcacaaacgtagcgctgattacagatggcagatattcaggtgccagtcatggatttattgttggacacattgtcccagaagctgcagtgggcggtccgattgctgttgtgcaggatggtgatacgatcacaatcaacgcggataccaacgaactcacaatggatgtttctgacgaagaaatcgcacagcgtttgaaggggtggaaaccgccaaaaccacgtgttacccggggggtgctggcgaagtatgctaaattagtcggagatgcatcaaatggtgctatgactgaccagttttag

SEQ ID NO: 480 - protein, 608 aa, Coccidioides immitis
MASQAPIAQDGPNEEAKYIDFPCLPDDAMRDGKPALNKYSQFITKGHDYPGAQAMLYAAGVPDRDAMKTSPHVGIASVWWEGNPCNMHLLDLGKTVKKAVIDQGMLGWQYNTIGVSDAITMGHEGMRFSLQSREIIADSIETVTCAQYHDGCIAIPGCDKNMPGCIMAMGRHNRPSLMIYGGTIQGGYSKLLRRPINVSTCYEAAGAYAYNTLVQPDDGGDRSKTKDEIMEDIERHACPSAGACAGMYTANTMATAIESMGLTLPGSSSTPATSPAKMRECVKAADAIKLCMERNIRPRDLLTKRSFENALVMTMALGGSTNGVVHFIAMARSAGVHLMLDDIQRVSDKIPFIANLAPSGKYYMADLYEIGGIPSVQKLLVAAGLLDGGIPTVTGKTLAENIASFPSLPQDQAIIHPLDNPIKSTGHLQVLRGNLAPGGAVAKITGKEGTKFTGKARVFNKEHELDAALSRGEIPRGDNLVLVVRYEGPKGGPGMPEQLKASAALMGAKLTNVALITDGRYSGASHGFIVGHIVPEAAVGGPIAVVQDGDTITINADTNELTMDVSDEEIAQRLKGWKPPKPRVTRGVLAKYAKLVGDASNGAMTDQF

SEQ ID NO: 481 - DNA, 1788 bp, Paracoccidioides brasiliensis
atgaatcccgaagagaaggtcgatggcttcgaagagccgcgatacatccagttcccttgcctgccggacgatgcgactcgggatggaaagccggtgttgaataaatattctacatttcttacagcgatgttatatggcgcgggggtgccggatcgtgagagcatgaaaaatagcccccaggtcggcattgcgacggtatggtgggaagggaatgcctgtaatatgcaccttttggatctggggaagacggtcaaaaaagccatcacggatcaggggatgctgggctggcaatataacaccatcggtgtctccgatgctatttccatgggtagtgaaggtatgcgatactccctccaatctcgggagatcattgcagacagcatcgagacagtagtaggtgctcaatatcatgatgctgcattgcgattccgttgcgacaagaacatgccaggctgcgtcatgggtatggccagacataacagaccgtctttgatgatatacggtgggacaattcaggtcgggtactccaagttactccgcaggcgaatcaacgtctctacttgctacgaagcagctggcgcgtacgcttacaacaccttaacccagcccgacgacggcggagaccgctcgaggacgaaagatgaaatcatggaagacattgagcgaaatgcctgtcccagcgctggcgcatgcgcgggaatgtacacagcaaacaccctggctaccgcgattgagtcaatgggtttgactctgccaggctcctcgtccaccccagctacggtgcctgccaagatgcgcgagtgcgtaaaagcagcggacgcgatcagaatatgtatggagaagaacattaggccgcgagatctacttacgaaacgctcctttgagaatgcgctggtaataaccatggcgctgggcgggagcacgaacagcatcgttcacctgatagcgatggccagaacggcccgggttgaattaacactcgatgattcccagcgtgtgagcgacaaaatcccgtttattgttgacttggcacccagtgggaaatactacatggcagacctttatgaaattggcgggattccatctgtgcagaagctgttgattgccgcaggcttgatggacggtgacatccccacagtaactggcaaaacgctagcagagaacatccaatccttcccctccctcccacaggaccaggccatcatccacccgctagccaaccccatcaagagcacgggccatatacaaatattgaaaggcaacctcgcccccggcggcgccgtagccaaaatcacaggcaaagaaggcaccaaattcaccggcaaagccctcgttttcaacaaagaacacgagcttgacgaagcgcttaacaagggcctaataccccgcggcgaaaacctagtgctaatagttcgctacgagggtccgaagggtggccccggcatgcccgagcagctgaaggccagcgcagcgctgatgggcgccaaactgacgaatgtcgcgctaattacggacgggaggtattcgggggccagtcatgggtttattgtcgggcatattgtgcctgaggcggcggttggggggcccattgctgttgtgcacaatggggatatgattacgattgatgcggagagaaatgagattagtatggcggtttcggaggaggaggttgcggagaggttgaaggagtggaggccgccgaagccgcatgtgactagggggacgttggccaagtatgcgagacttgttggagacgcgtcgcatggggctatgacggatatgttttga

SEQ ID NO: 482 - protein, 595 aa, Paracoccidioides brasiliensis
MNPEEKVDGFEEPRYIQFPCLPDDATRDGKPVLNKYSTFLTAMLYGAGVPDRESMKNSPQVGIATVWWEGNACNMHLLDLGKTVKKAITDQGMLGWQYNTIGVSDAISMGSEGMRYSLQSREIIADSIETVVGAQYHDAALRFRCDKNMPGCVMGMARHNRPSLMIYGGTIQVGYSKLLRRRINVSTCYEAAGAYAYNTLTQPDDGGDRSRTKDEIMEDIERNACPSAGACAGMYTANTLATAIESMGLTLPGSSSTPATVPAKMRECVKAADAIRICMEKNIRPRDLLTKRSFENALVITMALGGSTNSIVHLIAMARTARVELTLDDSQRVSDKIPFIVDLAPSGKYYMADLYEIGGIPSVQKLLIAAGLMDGDIPTVTGKTLAENIQSFPSLPQDQAIIHPLANPIKSTGHIQILKGNLAPGGAVAKITGKEGTKFTGKALVFNKEHELDEALNKGLIPRGENLVLIVRYEGPKGGPGMPEQLKASAALMGAKLTNVALITDGRYSGASHGFIVGHIVPEAAVGGPIAVVHNGDMITIDAERNEISMAVSEEEVAERLKEWRPPKPHVTRGTLAKYARLVGDASHGAMTDMF

SEQ ID NO: 483 - DNA, 1635 bp, Phaeosphaeria nodorum
atggatccgcgcaaccttgaaaagcagcgagagccagaggagccgcgcttcctcacgttcccgcatctgccagaggatgccatgcgagatggcaagcctgcgttgaacaaatactcgtctactcttactgctggccataactttccgggagctcaggccatgctttatgcggctggtgttccctcgaaggaagccatgaagacacagcctcacgtaggcattgcgagtgtatggtgggaaggcaacccatgcaaaactgcagtgctcgacctgggaaaggagattaagaaaaacgtccaggctgacaatatgctggcatggcagtacaacactgtgggcgtgtcggatggtattacgatgggtggagagggcatgcgcttctctctgcagactcgcgagataatagcagacagtattgagacggtcacgtgcgcgcaacatcacgacgcgtgtattgccattcccggatgcgacaagaatatgcctggtgtcatcatggcatttgcccgtcacaaccgaccatcgataatggtatatggcggctccataatgccaggctattccgagacgctcaagaagcccatcaacatttcaacatgctacgagaaacacggtgcctatatctacaagaatctggagagtgctgaaaaggggaaattttcgccagaggaaatcatggatgacattgagcgcaatgcatgcccgggtgctggcgcatgtggcggcatgtacactgccaacactatgtccacgtccattgaggccaagatgcgcgaatgtgccaaagctgcagctgccatccgcgtctgcatggaaaagaacatcacgccccggaaactactcaccaaggcctccttcgagaatgccctcgtcatgatgatggtcctcggcggctcgaccaacgccgtcctgcacatgctcgccatggccggtacagcaggcgtccccttaacccttgacgacttccagcgcgtgtccaacaaaattcccttcctcgccgacctcgccccctctggccgctacatggctgccgacctctttgacattggcggcatgccctccgtcatgaagctcctcgtcgccgcgggcctccttgacggtagcatccccaccgttaccggcaagaccctcgcagaaaacatcgagccctacccttccttgccgcaagatcaggtcctcatccgccccctctccaaccccatcaaagccaccggccacatcgagatcctacgcggcaacctcgcgcccgccggcgccgtggcgaaaatcacggggaaagagggcttgatattccgcggtagggcgatggtatttgacaaggaacaccagcttgacaaggcgctgaatgaaggtcgtattccgcatggcgagaatatcgtcgttgtcgtgcgctacgagggaccgaagggtggcccgggtatgcccgagcaactcaaagccagcgcggcgattatgggcgcgaaactcaccaacgtcgcgctaattacggatgggcggtatagtggtgccagtcacgggtttattgtcgggcacatgtgtccagaagcggccgtgggtggccccattgctgtggttagggatggggatgttatcactattggtaagtcgtgttgcaaagtcggagagagatggtga

SEQ ID NO: 484 - protein, 544 aa, Phaeosphaeria nodorum
MDPRNLEKQREPEEPRFLTFPHLPEDAMRDGKPALNKYSSTLTAGHNFPGAQAMLYAAGVPSKEAMKTQPHVGIASVWWEGNPCKTAVLDLGKEIKKNVQADNMLAWQYNTVGVSDGITMGGEGMRFSLQTREIIADSIETVTCAQHHDACIAIPGCDKNMPGVIMAFARHNRPSIMVYGGSIMPGYSETLKKPINISTCYEKHGAYIYKNLESAEKGKFSPEEIMDDIERNACPGAGACGGMYTANTMSTSIEAKMRECAKAAAAIRVCMEKNITPRKLLTKASFENALVMMMVLGGSTNAVLHMLAMAGTAGVPLTLDDFQRVSNKIPFLADLAPSGRYMAADLFDIGGMPSVMKLLVAAGLLDGSIPTVTGKTLAENIEPYPSLPQDQVLIRPLSNPIKATGHIEILRGNLAPAGAVAKITGKEGLIFRGRAMVFDKEHQLDKALNEGRIPHGENIVVVVRYEGPKGGPGMPEQLKASAAIMGAKLTNVALITDGRYSGASHGFIVGHMCPEAAVGGPIAVVRDGDVITIGKSCCKVGERW

SEQ ID NO: 485 - DNA, 1803 bp, Gibberella zeae
atggcggaccaagtcactcacgatcccaagcagtcaagcgactacatccccttcccttgccttcctcccggcggagctctcaaccgttggtctacaaagatcacccgcgagcatgactaccccggagctcaggctatgctctacggagctggtgtcaaggaccagcacacaatgaagaacgcgccccaggttggtgttgctaccgtctggtggcaaggaaacccgtgcaatacccatctccttgatcttggccagatcgtcaagaactccatcgagaaggaaggcatgatcggctggcagttcaacaccgttggtgtatctgacgccatcaccatgggcggcgagggcatgcgcttctctcttcaaactcgagaaatcattgctgattctatcgagtccgtaacctgcgcccagcatcatgacgccaacatctccattcccggctgtgacaagaacatgcccggcacagtcatggccgccgctcgtcacaaccgccccttcatcatgatctacggcggtaccatccgcaagggccactccaacctccttgagaagcccatcaacatcagcacctgctacgaggcctcgggtgctttcaactacggtcgtctgcatgccaagacgaaccccggcgagcctggtcgcgagagctccgatgtcatggatgatatcgagaagcacgcttgtcccggcgccggagcttgtggtggcatgtatacagccaacaccatggctaccgctatcgaggccatgggccttactctgcctggttcatcatcgtaccctgccgagtctcctgagaagcgtcgtgagtgtgagcgcgctgcccaggttatccgaactaccatggagaaggaccttcgtcctcgcgatatcatgacccgtgcctctttcgagaacgctcttgtcctgaccatgattctcggtggttcaacaaacggtgttcttcacttcctcgccatggccaacaccgccgatgttcccctgaccattgacgacatccagcgtgccagtgaccgcacccccttcctcgctgatctcgcccccagtggaaagtactacatggaggatctctacaaggtcggcggtacaccctccgtcatcaagatgctcgtcgcccgtggtcttctcgacggtagcatcatgaccattaccggcaagactctcgccgagaacgtcgcggactggcctagtctggaccccggccaggacatcatccgtcctcttgagaaccccatcaaggactctggccacatccgcatcctaaagggtaactttgcccccggcggcgccgtcgctaagatcactggaaaggagggtctgtccttcaccggcaaggcccgtgtcttcaacaccgagaaggagctcaacggcgcactgaaccgaagcgagatcaagcagtccgatggtaacctcgtcgtcatcgtccgatacgagggccccaagggcggtcccggtatgcctgaacagctcaaggcttctgcagccatcatgggtgccggcctctccaacctggcacttgtcaccgacggacgatacagtggtgcttctcacggtttcatcgtgggccacgttgtgcctgaggctatggtcggaggtcccatcgctctggtcaaggatggagacgagatcactatcgatgcgattaacaaccgaatcgatgtcgacatcactgacgaggagatggagaagcgaaggagtgagtggaagcctcctgcgccccgtgttacgaggggtgtgttggccaagtatgcccgcttggtcggtgatgcttcccacggtgctgtaacagatcagtggtag

SEQ ID NO: 486 - protein, 600 aa, Gibberella zeae
MADQVTHDPKQSSDYIPFPCLPPGGALNRWSTKITREHDYPGAQAMLYGAGVKDQHTMKNAPQVGVATVWWQGNPCNTHLLDLGQIVKNSIEKEGMIGWQFNTVGVSDAITMGGEGMRFSLQTREIIADSIESVTCAQHHDANISIPGCDKNMPGTVMAAARHNRPFIMIYGGTIRKGHSNLLEKPINISTCYEASGAFNYGRLHAKTNPGEPGRESSDVMDDIEKHACPGAGACGGMYTANTMATAIEAMGLTLPGSSSYPAESPEKRRECERAAQVIRTTMEKDLRPRDIMTRASFENALVLTMILGGSTNGVLHFLAMANTADVPLTIDDIQRASDRTPFLADLAPSGKYYMEDLYKVGGTPSVIKMLVARGLLDGSIMTITGKTLAENVADWPSLDPGQDIIRPLENPIKDSGHIRILKGNFAPGGAVAKITGKEGLSFTGKARVFNTEKELNGALNRSEIKQSDGNLVVIVRYEGPKGGPGMPEQLKASAAIMGAGLSNLALVTDGRYSGASHGFIVGHVVPEAMVGGPIALVKDGDEITIDAINNRIDVDITDEEMEKRRSEWKPPAPRVTRGVLAKYARLVGDASHGAVTDQW

SEQ ID NO: 487 - DNA, 1923 bp, Neurospora crassa
atggcttccaaccaagataataaggctgtcgctcccgacgccgccgctcccgccggccagtccaccaccaccacgaccaccaacgacaacagcgagcgcaacttgcccaaagagggcgaatacatccaatggcgtactctcccagctggcaaccccgaccagttgaaccgctggtcgcactttttgactcgtgagcatgagtttcctggagctcaggccatgctctacggcgccggtgtcccgaataaggacatgatgaagaaggcgccgcatgtcggcattgcgacggtctggtgggagggcaacccctgcaacacccatttgctggatcttggccaaaaggtcaagaaggccgttgagcgcgagaagatgcttgcgtggcagttcaacaccattggtgtctcggatggtatcaccatgggcggagagggcatgcgctactcgcttcagtctcgcgagatcatcgccgactccatcgagaccgtgacgtgcgctcagcatcatgacgccaacatctccattcccggctgcgacaagaacatgcccggtgtcatcatggccgcggcccgccacaaccgtcccttcgtcatgatctacggcggcaccatgcgcggcggccactcggagctcctcgaccgccccatcaacatcgtcacttgctacgaggcttccggcgcttacacgtatggccgtctcaagcccgcttgccccaacagcaccgccaccccttcggacgtcatggacgacatcgagcagcacgcctgccccggcgccggcgcctgcggcggcatgtacaccgccaacaccatggcgaccgccatcgaagccatgggcctcaccgcaccgggctcctcttctttccctgcctcttcgcccgaaaagttccgcgagtgcgaaaaagccgccgagtacatcaagatctgtatggagaaggacattcgcccgcgcgacctcttgaccaaggcctcgttcgagaacgccctcgtgctcaccatgatcctcggcggttctaccaatggcgttctgcactacctcgccatggccaactcggccgacgtcgacttgactctggacgacatcaaccgcgtctcagccaagacgccctttttggctgacatggccccctccggcaggtactacatggaagacctgtacaaagtcggcggcacccccgcggtcctcaagatgctcatcgccgcaggctatatcgatggcaccatccccactatcaccggcaagtctttggcggaaaacgtatccgactggcctagtctcgaccccgatcaaaaaatcatccgcccccttgacaaccccatcaagtcccaggggcatatccgtgtcttgtacggaaacttctcccccggtggtgcggtcgccaagattacaggcaaggaaggtctctccttcaccggcaaagcccgttgtttcaacaaggaattcgagctcgacgccgccttgaagaactcggaaattaccctcgagcaaggaaaccaggtcctcatcgtgcggtacgaaggacccaaaggcggtccaggtatgccagagcaactgaaggcttcagcggcgatcatgggcgcgggcctgacgaatgtcgcgctggtgacggatggtcggtactctggtgcgtcgcatgggtttattgtgggccatgtggtccccgaggcggcgacgggggggccgattgcgctggtgaaggacggggatttgattacgattgatgcggttaggaaccggattgatgtcgtcaagactgtggaaggcgtcgagggtgaggaagagattgccaaggtgttggaggagagaaagaaggggtggaaggcgccgaagatgaagccgacgaggggggcgttggccaagtatgcgaggttggtgggggatgcgtcgcatggggctgttactgatttgggtggggatgcctattag

SEQ ID NO: 488 - protein, 640 aa, Neurospora crassa
MASNQDNKAVAPDAAAPAGQSTTTTTTNDNSERNLPKEGEYIQWRTLPAGNPDQLNRWSHFLTREHEFPGAQAMLYGAGVPNKDMMKKAPHVGIATVWWEGNPCNTHLLDLGQKVKKAVEREKMLAWQFNTIGVSDGITMGGEGMRYSLQSREIIADSIETVTCAQHHDANISIPGCDKNMPGVIMAAARHNRPFVMIYGGTMRGGHSELLDRPINIVTCYEASGAYTYGRLKPACPNSTATPSDVMDDIEQHACPGAGACGGMYTANTMATAIEAMGLTAPGSSSFPASSPEKFRECEKAAEYIKICMEKDIRPRDLLTKASFENALVLTMILGGSTNGVLHYLAMANSADVDLTLDDINRVSAKTPFLADMAPSGRYYMEDLYKVGGTPAVLKMLIAAGYIDGTIPTITGKSLAENVSDWPSLDPDQKIIRPLDNPIKSQGHIRVLYGNFSPGGAVAKITGKEGLSFTGKARCFNKEFELDAALKNSEITLEQGNQVLIVRYEGPKGGPGMPEQLKASAAIMGAGLTNVALVTDGRYSGASHGFIVGHVVPEAATGGPIALVKDGDLITIDAVRNRIDVVKTVEGVEGEEEIAKVLEERKKGWKAPKMKPTRGALAKYARLVGDASHGAVTDLGGDAY

SEQ ID NO: 489 - DNA, 1575 bp, Coprinopsis cinerea
atggataaaccccagatcggtatttcgccggtctggtgggaaggcaatccatgcaatttccacctccttgaccttgcaaagcatgtcaagaaaggctgtcaagaagaagaccagattgggttgatctttaataccatcggtgtcagtgatgccattacgatgggtacagacggaatgcggtacagtctacccagtcgagacctcatcgcggactccatcgaagcagtcgtcatggcccagcactacgacggaaacatcgctattcctggatgcgacaagaacatgcccggctgcttcatggctgctgtccgacacaaccgaccgaccattatcgtctatggagggactatccaacctggtacccggcacgttggtgcctttactgtgggcaagatcaccgatgagcagaggttcgacgttgtgcgacatgcctgtcctggccccggagcctgcggcggaatgtacactgcgaacacgatgagttctgccctcgaggtcctcggcttgtcgctcccgtattcttcaagtatcccagcgatgcatccagagaaggtccaagaatgcttcagggctgccaagtacatgaagaagctgcttgagttggatttgaagcccagggatatcttgacgaagcagtccttcctgaatgccattgtcatcatcaccgttctgggaggctccacgaacgcggttctccacttgttggcaatggcccgagctgctgagattgatctcaccatcgacgacttccaagctgtagcagacaggacaccattcctggccgacctcatgccgtcaggtcgctattacatggaagacatccaccgcattggcggcatccccgccatcgtcaagtatttgttgaaccactccgatctcatcgacggaaaccagatgactgtcactggaaagacgctggctgagaacctagcggatgttcctgagcttgagttccataaccaggacgtcttccgtccactggacaatcctatcaagccgacaggtcatatcacgatcttgagaggtaacctggcgccagaaacagctgttgcgaagctcactggcaaagagggactgagattcgagggtgtcgcgcgttgcttcgatagcctcgagaagttctaccccgctcttgctgcaggggaaatcaaacccggaactgtcctaatcttcagatatcaaggtcccaaaggtgcacccggtatgccggagatgttgggtatgagcgctgcatcgcgtggtccaactggagctatcgcaggcgctggcttggccaactcgactgcgttgatcacggacggccgtttctctggcgccagccgagggtttattattgggcacgtcgtcccagaggcacgagttggcggacccattgcccttgtcaaggacggagacaagatcgtcatcgacgccgagactcgaacaatcaactggctcgtggatgaggaagaacaagcaaagaggaggaaagaatgggaggcgtcggataacggcaagttgaatgtgaagagaggagttttgtaccgatatgccagagatgtcgcgcctgcaagcatgggagcatattgtgattga

SEQ ID NO: 490 - protein, 524 aa, Coprinopsis cinerea
MDKPQIGISPVWWEGNPCNFHLLDLAKHVKKGCQEEDQIGLIFNTIGVSDAITMGTDGMRYSLPSRDLIADSIEAVVMAQHYDGNIAIPGCDKNMPGCFMAAVRHNRPTIIVYGGTIQPGTRHVGAFTVGKITDEQRFDVVRHACPGPGACGGMYTANTMSSALEVLGLSLPYSSSIPAMHPEKVQECFRAAKYMKKLLELDLKPRDILTKQSFLNAIVIITVLGGSTNAVLHLLAMARAAEIDLTIDDFQAVADRTPFLADLMPSGRYYMEDIHRIGGIPAIVKYLLNHSDLIDGNQMTVTGKTLAENLADVPELEFHNQDVFRPLDNPIKPTGHITILRGNLAPETAVAKLTGKEGLRFEGVARCFDSLEKFYPALAAGEIKPGTVLIFRYQGPKGAPGMPEMLGMSAASRGPTGAIAGAGLANSTALITDGRFSGASRGFIIGHVVPEARVGGPIALVKDGDKIVIDAETRTINWLVDEEEQAKRRKEWEASDNGKLNVKRGVLYRYARDVAPASMGAYCD

SEQ ID NO: 491 - DNA, 1767 bp, Laccaria bicolor
atgtcagctccgggagacgtttacattcacgatgtcctcaagaaatcgagcctccccgattcgaagttgaacaggatatcctgtcaattaacgcaaaacaagattcggggtggcgctcaggcgatgctttacgctgtcggtttgagtgaggacgatatgaacaagcctcagattgggatttctccagtgtggtgggaagggaacccatgtaactctcaccttcttgaccttgccaagcacgtaaaggaaggttgtaaagcagaggatcttgttggtcttatcttcaataccattggcgtcagcgacgcgattacgatgggaacagatggaatgagatattctctgccaagtcgagatatcattgcagattcaatcgaagctgctcaacattacgacgccaacatctcaataccagggtgtgacaagaacatgccaggttgcttcatcgccgcagtccgtcataatcgaccaacgatcattgtttacggtggaactattcaaccgggcgtccggcatgtcgattgcccttcgatgggcaaggaaaaaggtggatcagtgaatatctctgacgcatttgaatcttatggggcattcgccgttggaaaaattaacgacgtggagcgatttgatgtcgttcgccacgcatgtcctggcgcaggggcttgtggaggcatgtacactgcgaacaccatgagttcagcccttgaggctcttgggatatctttgccctattcatcgagcacgccagccctgtaccccgagaaggttcaagagtgttttcgagcagcaaagtatttaaaacgtttgcttgaattagatctgaagcccaaggacattttgacccgaaactcgtttttaaatgctatcgtcatcataaccgttctcggtggctccacgaatgcagttttgcacttgctagctatggctcgcgcagctgaggtagaactcacaatcgatgacttccaaatgattgcagacaaaacgcctttcctggccgatttaatgccttcagggaggtattatatggaggatatccacaagatcggaggaatccctgccattctgaaatacctattgaaccacaccgatcttatcgatgggacacagatgacggtgaccgggcgtactttggcagaaaacctcgcagatgtacctgagctcgagttcgataagcaagatgttgttcgaagcttgagcaatcctatcaagaaaacgggccatatcacgatcatgcggggaaatctagctccagagacggccgtagccaaactcacagggaaagaaggtctcaaatttgagggaattgcgagatgctttgatagcttggatggattctatccagcgcttgaggcgggtgagatcaaggcaggcacggtgcttatctttaggtatcaaggaccaaaaggtgcacccggtatgcccgagatgcttggtccaacaggagccattgcaggcgctggacttgctcgttccacagccttaataacagatggtcgcttctcaggagccagtcgaggatttatcataggtcacgtcgtgccggaagcccgtgttggaggacctatcgcactcgttaagaatggggaccgaatcgtcattgattccgagacccgaacgatcaactggctggttgatgagaacgaacaaaaactgcgcaaggcagaatgggatgcctcagagaattcgaaattcaatgtcgggcggggtgtacttttgaggtacgctcgagatgtcgcaccggccaaccttggagcatattgcgattga

SEQ ID NO: 492 - protein, 588 aa, Laccaria bicolor
MSAPGDVYIHDVLKKSSLPDSKLNRISCQLTQNKIRGGAQAMLYAVGLSEDDMNKPQIGISPVWWEGNPCNSHLLDLAKHVKEGCKAEDLVGLIFNTIGVSDAITMGTDGMRYSLPSRDIIADSIEAAQHYDANISIPGCDKNMPGCFIAAVRHNRPTIIVYGGTIQPGVRHVDCPSMGKEKGGSVNISDAFESYGAFAVGKINDVERFDVVRHACPGAGACGGMYTANTMSSALEALGISLPYSSSTPALYPEKVQECFRAAKYLKRLLELDLKPKDILTRNSFLNAIVIITVLGGSTNAVLHLLAMARAAEVELTIDDFQMIADKTPFLADLMPSGRYYMEDIHKIGGIPAILKYLLNHTDLIDGTQMTVTGRTLAENLADVPELEFDKQDVVRSLSNPIKKTGHITIMRGNLAPETAVAKLTGKEGLKFEGIARCFDSLDGFYPALEAGEIKAGTVLIFRYQGPKGAPGMPEMLGPTGAIAGAGLARSTALITDGRFSGASRGFIIGHVVPEARVGGPIALVKNGDRIVIDSETRTINWLVDENEQKLRKAEWDASENSKFNVGRGVLLRYARDVAPANLGAYCD

SEQ ID NO: 493 - DNA, 1794 bp, Ustilago maydis
atggtcaacggagaagtcgagctgcgcacaacttcgcgcaccaatggtgacgctcccgccccgatcctgaacaggatcagtcgatacatcacgcaatcctccgacaagggagctgctcaatccatgcttcacgcgtgcggtctttcggtacaagacctcgacaagccccaggttggcatctcatctgtatggtgggaaggcaacccatgcaatactcacctgctcgaatttggccgcaagatcaagcaaggctgcgaagcggaaggtctggtgggcttgcaaaataacacggtgggcgtttccgatgccatcaccatgggcggccccggaatgcagtattcgcttccttcgagagagctgatcgccgactctatcgagacgatcaccctcgcgcagtatcatgacgctaatgtgtccatccccggttgtgacaagaacatgcctggctgtctcattgcttgtctgcgtcacaaccgcccatcaatcatcgtttatggcggcacgatccaacccggcaagcacggaatggacatacccgctcttggaaggaagaagggcgacccatgcaatgtcgccgacaatttcgaagcgacaggagcttacgccaagggcctcatcacggcagaagagcgtgtcgacctgatccgcaacgcctgtcccggtcctggtgcttgcggaggcatgtacaccgccaacaccttgtctatcgcgatcgaagtcatggggatgggtctcccgttgaccagcagtactcccgctgtctaccctgaaaagatgcaagaatgtctgcgtgttggagcctacatcaagaatctgctagccaaggatatcaagcctcgcgacatcatgaccaagaaggcttttgagaatgctatcgtgatgactcatgttcttggtggctcgactaatgctgttctccatctcatcgctgttgcacgtgctggcgatatcgacattaccatcgacgacttccaaaggctcggcgacaagacacccatgttggccgacgtcaagccatcgggcaagtattacatggaagacattcacaagatcggaggtgttcctcgtgtgctcaagtacattctggagaacacggatctgcttcatggtgacgtgatgacggtgacgggtaaaacgatgcgcgagaatctcgtcgatgttgaaccactggagtttgagacgcaagatatcatccgacctctcagcaaccctatcaaggcaacgggccacctgaccatcatgcgtggatcgctgtgccccggcggagctgtgtccaagctgacgggcaaagaggggctgtactttgacggcagcgctgttgtctttgactctgaagacggcatcaccgaagcaatcgcagaaggccgtgtcaaagaaggcagcgttgtcgtcattcgctatgttggaccaaaaggtggtcctggtatgcccgagatgctcggaccaaccggtgcgatcatgggcgcaggtctcggaaaaacagtagcgctcatcaccgacggtcgtttctctggcgcttcgcacggattttgcacaggacatgttgtgccagaagcagccctgggaggaccgatcgcgctcgtacaagacggagacaggatcactgtcgatgccaacacgcgcgagatcaacttgcacatcagtgacgaagagatggagaagaggaaacagtggtggctcaaagagaaaaagcctactctgacaaagaaacacaagcgcggttggctgtacaagtttgcaagggatgtacaaaacgcttccgagggttgtgttactgatcgcgatctgttttga

SEQ ID NO: 494 - protein, 597 aa, Ustilago maydis
MVNGEVELRTTSRTNGDAPAPILNRISRYITQSSDKGAAQSMLHACGLSVQDLDKPQVGISSVWWEGNPCNTHLLEFGRKIKQGCEAEGLVGLQNNTVGVSDAITMGGPGMQYSLPSRELIADSIETITLAQYHDANVSIPGCDKNMPGCLIACLRHNRPSIIVYGGTIQPGKHGMDIPALGRKKGDPCNVADNFEATGAYAKGLITAEERVDLIRNACPGPGACGGMYTANTLSIAIEVMGMGLPLTSSTPAVYPEKMQECLRVGAYIKNLLAKDIKPRDIMTKKAFENAIVMTHVLGGSTNAVLHLIAVARAGDIDITIDDFQRLGDKTPMLADVKPSGKYYMEDIHKIGGVPRVLKYILENTDLLHGDVMTVTGKTMRENLVDVEPLEFETQDIIRPLSNPIKATGHLTIMRGSLCPGGAVSKLTGKEGLYFDGSAVVFDSEDGITEAIAEGRVKEGSVVVIRYVGPKGGPGMPEMLGPTGAIMGAGLGKTVALITDGRFSGASHGFCTGHVVPEAALGGPIALVQDGDRITVDANTREINLHISDEEMEKRKQWWLKEKKPTLTKKHKRGWLYKFARDVQNASEGCVTDRDLF

SEQ ID NO: 495 - DNA, 1851 bp, Escherichia coli
atgcctaagtaccgttccgccaccaccactcatggtcgtaatatggcgggtgctcgtgcgctgtggcgcgccaccggaatgaccgacgccgatttcggtaagccgattatcgcggttgtgaactcgttcacccaatttgtaccgggtcacgtccatctgcgcgatctcggtaaactggtcgccgaacaaattgaagcggctggcggcgttgccaaagagttcaacaccattgcggtggatgatgggattgccatgggccacggggggatgctttattcactgccatctcgcgaactgatcgctgattccgttgagtatatggtcaacgcccactgcgccgacgccatggtctgcatctctaactgcgacaaaatcaccccggggatgctgatggcttccctgcgcctgaatattccggtgatctttgtttccggcggcccgatggaggccgggaaaaccaaactttccgatcagatcatcaagctcgatctggttgatgcgatgatccagggcgcagacccgaaagtatctgactcccagagcgatcaggttgaacgttccgcgtgtccgacctgcggttcctgctccgggatgtttaccgctaactcaatgaactgcctgaccgaagcgctgggcctgtcgcagccgggcaacggctcgctgctggcaacccacgccgaccgtaagcagctgttccttaatgctggtaaacgcattgttgaattgaccaaacgttattacgagcaaaacgacgaaagtgcactgccgcgtaatatcgccagtaaggcggcgtttgaaaacgccatgacgctggatatcgcgatgggtggatcgactaacaccgtacttcacctgctggcggcggcgcaggaagcggaaatcgacttcaccatgagtgatatcgataagctttcccgcaaggttccacagctgtgtaaagttgcgccgagcacccagaaataccatatggaagatgttcaccgtgctggtggtgttatcggtattctcggcgaactggatcgcgcggggttactgaaccgtgatgtgaaaaacgtacttggcctgacgttgccgcaaacgctggaacaatacgacgttatgctgacccaggatgacgcggtaaaaaatatgttccgcgcaggtcctgcaggcattcgtaccacacaggcattctcgcaagattgccgttgggatacgctggacgacgatcgcgccaatggctgtatccgctcgctggaacacgcctacagcaaagacggcggcctggcggtgctctacggtaactttgcggaaaacggctgcatcgtgaaaacggcaggcgtcgatgacagcatcctcaaattcaccggcccggcgaaagtgtacgaaagccaggacgatgcggtagaagcgattctcggcggtaaagttgtcgccggagatgtggtagtaattcgctatgaaggcccgaaaggcggtccggggatgcaggaaatgctctacccaaccagcttcctgaaatcaatgggtctcggcaaagcctgtgcgctgatcaccgacggtcgtttctctggtggcacctctggtctttccatcggccacgtctcaccggaagcggcaagcggcggcagcattggcctgattgaagatggtgacctgatcgctatcgacatcccgaaccgtggcattcagttacaggtaagcgatgccgaactggcggcgcgtcgtgaagcgcaggacgctcgaggtgacaaagcctggacgccgaaaaatcgtgaacgtcaggtctcctttgccctgcgtgcttatgccagcctggcaaccagcgccgacaaaggcgcggtgcgcgataaatcgaaactggggggttaa

SEQ ID NO: 496 - protein, 616 aa, Escherichia coli
MPKYRSATTTHGRNMAGARALWRATGMTDADFGKPIIAVVNSFTQFVPGHVHLRDLGKLVAEQIEAAGGVAKEFNTIAVDDGIAMGHGGMLYSLPSRELIADSVEYMVNAHCADAMVCISNCDKITPGMLMASLRLNIPVIFVSGGPMEAGKTKLSDQIIKLDLVDAMIQGADPKVSDSQSDQVERSACPTCGSCSGMFTANSMNCLTEALGLSQPGNGSLLATHADRKQLFLNAGKRIVELTKRYYEQNDESALPRNIASKAAFENAMTLDIAMGGSTNTVLHLLAAAQEAEIDFTMSDIDKLSRKVPQLCKVAPSTQKYHMEDVHRAGGVIGILGELDRAGLLNRDVKNVLGLTLPQTLEQYDVMLTQDDAVKNMFRAGPAGIRTTQAFSQDCRWDTLDDDRANGCIRSLEHAYSKDGGLAVLYGNFAENGCIVKTAGVDDSILKFTGPAKVYESQDDAVEAILGGKVVAGDVVVIRYEGPKGGPGMQEMLYPTSFLKSMGLGKACALITDGRFSGGTSGLSIGHVSPEAASGGSIGLIEDGDLIAIDIPNRGIQLQVSDAELAARREAQDARGDKAWTPKNRERQVSFALRAYASLATSADKGAVRDKSKLGG

SEQ ID NO: 497 - DNA, 1677 bp, Bacillus subtilis
atggcagaattacgcagtaatatgatcacacaaggaatcgatagagctccgcaccgcagtttgcttcgtgcagcaggggtaaaagaagaggatttcggcaagccgtttattgcggtgtgtaattcatacattgatatcgttcccggtcatgttcacttgcaggagtttgggaaaatcgtaaaagaagcaatcagagaagcagggggcgttccgtttgaatttaataccattggggtagatgatggcatcgcaatggggcatatcggtatgagatattcgctgccaagccgtgaaattatcgcagactctgtggaaacggttgtatccgcacactggtttgacggaatggtctgtattccgaactgcgacaaaatcacaccgggaatgcttatggcggcaatgcgcatcaacattccgacgatttttgtcagcggcggaccgatggcggcaggaagaacaagttacgggcgaaaaatctccctttcctcagtattcgaaggggtaggcgcctaccaagcagggaaaatcaacgaaaacgagcttcaagaactagagcagttcggatgcccaacgtgcgggtcttgctcaggcatgtttacggcgaactcaatgaactgtctgtcagaagcacttggtcttgctttgccgggtaatggaaccattctggcaacatctccggaacgcaaagagtttgtgagaaaatcggctgcgcaattaatggaaacgattcgcaaagatatcaaaccgcgtgatattgttacagtaaaagcgattgataacgcgtttgcactcgatatggcgctcggaggttctacaaataccgttcttcatacccttgcccttgcaaacgaagccggcgttgaatactctttagaacgcattaacgaagtcgctgagcgcgtgccgcacttggctaagctggcgcctgcatcggatgtgtttattgaagatcttcacgaagcgggcggcgtttcagcggctctgaatgagctttcgaagaaagaaggagcgcttcatttagatgcgctgactgttacaggaaaaactcttggagaaaccattgccggacatgaagtaaaggattatgacgtcattcacccgctggatcaaccattcactgaaaagggaggccttgctgttttattcggtaatctagctccggacggcgctatcattaaaacaggcggcgtacagaatgggattacaagacacgaagggccggctgtcgtattcgattctcaggacgaggcgcttgacggcattatcaaccgaaaagtaaaagaaggcgacgttgtcatcatcagatacgaagggccaaaaggcggacctggcatgccggaaatgctggcgccaacatcccaaatcgttggaatgggactcgggccaaaagtggcattgattacggacggacgtttttccggagcctcccgtggcctctcaatcggccacgtatcacctgaggccgctgagggcgggccgcttgcctttgttgaaaacggagaccatattatcgttgatattgaaaaacgcatcttggatgtacaagtgccagaagaagagtgggaaaaacgaaaagcgaactggaaaggttttgaaccgaaagtgaaaaccggctacctggcacgttattctaaacttgtgacaagtgccaacaccggcggtattatgaaaatctag

SEQ ID NO: 498 - protein, 558 aa, Bacillus subtilis
MAELRSNMITQGIDRAPHRSLLRAAGVKEEDFGKPFIAVCNSYIDIVPGHVHLQEFGKIVKEAIREAGGVPFEFNTIGVDDGIAMGHIGMRYSLPSREIIADSVETVVSAHWFDGMVCIPNCDKITPGMLMAAMRINIPTIFVSGGPMAAGRTSYGRKISLSSVFEGVGAYQAGKINENELQELEQFGCPTCGSCSGMFTANSMNCLSEALGLALPGNGTILATSPERKEFVRKSAAQLMETIRKDIKPRDIVTVKAIDNAFALDMALGGSTNTVLHTLALANEAGVEYSLERINEVAERVPHLAKLAPASDVFIEDLHEAGGVSAALNELSKKEGALHLDALTVTGKTLGETIAGHEVKDYDVIHPLDQPFTEKGGLAVLFGNLAPDGAIIKTGGVQNGITRHEGPAVVFDSQDEALDGIINRKVKEGDVVIIRYEGPKGGPGMPEMLAPTSQIVGMGLGPKVALITDGRFSGASRGLSIGHVSPEAAEGGPLAFVENGDHIIVDIEKRILDVQVPEEEWEKRKANWKGFEPKVKTGYLARYSKLVTSANTGGIMKI

SEQ ID NO: 499 - DNA, 1836 bp, Agrobacterium tumefaciens
atgccagcctatcgctccagaacgacaacccacggccgcaacatggcgggcgcgcgcggcctttggcgcgccaccggcatgaaggacagcgatttcggcaagccgatcatcgcggtggtcaattccttcacgcagttcgtaccgggccatgtgcatctaaaggatctcggccagctcgttgcccgcgaaatcgaggcggccggcggcgttgccaaggaattcaacacgattgcggtcgatgatggtatcgccatgggccatgacggcatgctctattcgctgccgtcgcgcgagatcatcgctgactcggtcgaatatatggtcaatgcccattgcgccgatgcgatggtctgcatttccaactgcgacaagatcacgcccggcatgctgaatgccgcgatgcgcctcaacattcccgccgttttcgtgtccggtggtccaatggaagcgggcaaggtggttctgcacggcaagaccgttgcgctcgatctggtcgacgcgatggtggctgctgccgacgacaagatttccgatgaggacgtcaagatcatcgagcgctccgcctgcccgacctgcggttcctgttccggcatgttcacggccaattccatgaactgtctgaccgaggcgctcggcctgtcattgcccggcaacggctcgacgcttgccacccactccgatcgcaagcgcctgttcgttgaagccggtcacctgatcgtcgatctggcccgccgttattacgagcaggacgacgaaaccgttctgccgcgcaccatcgccaacaaggcggcgttcgaaaacgccatgtcgctggatattgccatgggcggctccaccaacacggttctgcatattctggcggcagcccacgagggcggcgtcgatttcggtatggaggacatcgaccggctttcccgcaaggttccctgcctttccaaggttgcgcctgcgaagcaggatgtgcacatggaagacgtgcatcgcgccggcggcatcatgcgtattctcggtgagctggagcgtggcggtctcatcaaccgcgatacctataccgtacacgaagcgacgcttggcgatgccatcgaccgctgggacatcacgcgcaccaacagcgaaatggtgcggcagttcttcaaggccgctccgggcggcgtaccgacacaggtggccttcagccagtcctcgcgctgggatgatctggacaccgacagcgacaacggcgtcattcgttcggtcgagaagcctttctccaaggatggcggtctggccgttctttacggcaacatcgcgctcgatggctgcatcgtgaagacggcgggtgttgatgaatccatcctgaaattcaacggatcggcagtcgtttacgaaagccaggacgcggccgtgaagggcattctcggcaacgaggtcaaggcgggcgacgtcgtcgtcatccgctatgaaggaccgaagggcggcccgggcatgcaggaaatgctctatccgaccagctacctcaagtccaagggcctcggtaaagcctgcgcgctcatcaccgatggtcgcttctccggtggcacgtcaggcctttccatcggtcatgcctcgccggaagcggcgcagggcggtgccatcggcctcgtgcgtcagggcgacctgattgagatcgatattccgaaccgcacgatcaatctcaaggtttcggatgcggaactggccgcgcgccgggccgagcaggaagaaaagggctggaagccggaagcaccgcgcaagcgtaatgtcacgacggcgctcaaggcctatgcggcctttgcgtcgagcgcggacaagggtgctgtgcggattctgccggagtaa

SEQ ID NO: 500 - protein, 611 aa, Agrobacterium tumefaciens
MPAYRSRTTTHGRNMAGARGLWRATGMKDSDFGKPIIAVVNSFTQFVPGHVHLKDLGQLVAREIEAAGGVAKEFNTIAVDDGIAMGHDGMLYSLPSREIIADSVEYMVNAHCADAMVCISNCDKITPGMLNAAMRLNIPAVFVSGGPMEAGKVVLHGKTVALDLVDAMVAAADDKISDEDVKIIERSACPTCGSCSGMFTANSMNCLTEALGLSLPGNGSTLATHSDRKRLFVEAGHLIVDLARRYYEQDDETVLPRTIANKAAFENAMSLDIAMGGSTNTVLHILAAAHEGGVDFGMEDIDRLSRKVPCLSKVAPAKQDVHMEDVHRAGGIMRILGELERGGLINRDTYTVHEATLGDAIDRWDITRTNSEMVRQFFKAAPGGVPTQVAFSQSSRWDDLDTDSDNGVIRSVEKPFSKDGGLAVLYGNIALDGCIVKTAGVDESILKFNGSAVVYESQDAAVKGILGNEVKAGDVVVIRYEGPKGGPGMQEMLYPTSYLKSKGLGKACALITDGRFSGGTSGLSIGHASPEAAQGGAIGLVRQGDLIEIDIPNRTINLKVSDAELAARRAEQEEKGWKPEAPRKRNVTTALKAYAAFASSADKGAVRILPE

SEQ ID NO: 501 - DNA, 1902 bp, Burkholderia cenocepacia
gtgcctccacccttttcccgcgatatttcttcagccatcaccatgcccacttaccgttccaaaacctccaccgccggccgcaacatggcaggtgcgcgctcgctgtggcgcgccaccggcatgaaagacgacgatttctcgaaaccgatcatcgcggtcgtcaactcgttcacgcaattcgtgcccgggcacgtgcacctgaaggatctcggccagctcgtcgcgcgcgagatcgaggctgccggcggcgtcgcgaaggaattcaacacgatcgcggtcgacgacggcatcgcgatgggccacgacggcatgctgtactcgctgccgagccgcgacatcatcgccgactcggtcgaatacatggtgaacgcgcactgcgcggacgcgatggtgtgcatctcgaactgcgacaagatcacgccggggatgctgatggccgcgatgcgcctgaacattccggtgatcttcgtgtcgggcggcccgatggaagccggcaagacgcgcctcgcgaacccggtcaccaagaccgtcgaactgaagaagctcgacctcgtcgacgcgatggtgatcgcggccgaccagtcgtattcggacgccgacgtcgccgaagtcgaacgctcggcctgcccgacctgcggctcgtgctcgggcatgttcaccgcgaactcgatgaactgcctgaccgaagcgctcggcctgtcgctgcccggcaacggtacggtggtcgccacgcacgccgatcgcgaacagctgttcaagcgcgccggccgccgcatcgtcgaactgacgcgccagcactacgagcaggacgacgaacgcgtgctgccgcgctcggtcggcttcaaggcgttcgagaacgcgatgacgctcgacatcgcgatgggcggctcgaccaacacgatcctgcacctgctcgcgatcgcgcaggaagccggcatcgacttcacgatgaaggacatcgaccgcctgtcgcgcaccgtgccgcagctgtgcaaggtcgcgccgaacacgaacaagtaccacatcgaggacgtgcaccgcgccggcggcatcatggcgatcctcggcgagctcgagcgcgccggcaagctgcacaccgacgtgccgaccgtccatgcgccgacgctgaaggatgcgctcgaccagtgggacatcgtcctcacgcaggacgaagcggtccgcaggttctacctggccggcccggccggcatcccgacgcaggtcgcgttcagccagaacacgcgctggccgagcctcgacctcgaccgcgccgaaggctgcatccgctcgtacgagcatgcgttctcgaaggaaggcggcctcgcggtgctgacgggcaacatcgcgctcgacggctgcgtggtgaagacggccggcgtcgacgaaagcatcctcgttttcgaaggctcggcgcacgtgaccgaatcgcaggacgaagcggtcgagaacatcctcaacgacaaggtcaaggccggcgacgtggtgatcgtgcgctacgaaggcccgaagggcggcccgggcatgcaggaaatgctctacccgaccagctacatcaagtcgaaagggctcggcaaggcgtgtgcgctgctgacggacggccggttctcgggtggtacgtcggggctgtcgatcggccattgctcgccggaagcggcggcaggcggcgcgatcggcctcgtgcgcgacggcgaccggatccgcatcgacattccgaaccgcacgatcgacgtgctggtgtcggacgaggaactggcgcgccgccgcgaggagcagaacgcgaagggctggaagcctgcgcagccgcgtccgcgcaaggtgtccgcggcgctcaaggcgtacgcgaagctcgtcatgtcggccgacaagggcgccgtgcgcgatctgtcgctgctcgacgactga

SEQ ID NO: 502 - protein, 633 aa, Burkholderia cenocepacia
MPPPFSRDISSAITMPTYRSKTSTAGRNMAGARSLWRATGMKDDDFSKPIIAVVNSFTQFVPGHVHLKDLGQLVAREIEAAGGVAKEFNTIAVDDGIAMGHDGMLYSLPSRDIIADSVEYMVNAHCADAMVCISNCDKITPGMLMAAMRLNIPVIFVSGGPMEAGKTRLANPVTKTVELKKLDLVDAMVIAADQSYSDADVAEVERSACPTCGSCSGMFTANSMNCLTEALGLSLPGNGTVVATHADREQLFKRAGRRIVELTRQHYEQDDERVLPRSVGFKAFENAMTLDIAMGGSTNTILHLLAIAQEAGIDFTMKDIDRLSRTVPQLCKVAPNTNKYHIEDVHRAGGIMAILGELERAGKLHTDVPTVHAPTLKDALDQWDIVLTQDEAVRRFYLAGPAGIPTQVAFSQNTRWPSLDLDRAEGCIRSYEHAFSKEGGLAVLTGNIALDGCVVKTAGVDESILVFEGSAHVTESQDEAVENILNDKVKAGDVVIVRYEGPKGGPGMQEMLYPTSYIKSKGLGKACALLTDGRFSGGTSGLSIGHCSPEAAAGGAIGLVRDGDRIRIDIPNRTIDVLVSDEELARRREEQNAKGWKPAQPRPRKVSAALKAYAKLVMSADKGAVRDLSLLDD

SEQ ID NO: 503 - DNA, 1911 bp, Psychrobacter cryohalolentis
atggattacaattcaaaaacctctaccggcggtcgtaatatggcaggtgctcgtgccctgtggcgcgcaactggcatgactgatggcgactttggcaaacctattattgcaattgccaactcttttacccagtttgtacccggccatgtgcatttaaaagatttgggacaaatggttgcacgcgagattgaaaaagcgggtggcgtggcaaaagaatttaataccattgctgttgatgatggtattgccatgggtcatagcggcatgttgtattcactaccgagtcgagatttgattgctgattctgtcgagtatatggtcaatgcccactgcgccgatgcgctagtatgtatttctaactgcgataaaatcactccgggtatgttgatggcagccatgcgcctcaatatccccgtcgtctttatttcaggtggcccaatggaagcgggtaaaattatcgccagcacggtcgcacacagtcataataatgatggtagtagcgacgtccatagcactgacagtaaaggtaatgccattcgtaagcttgacctcgttgatgcgatgatggacgcggccgatgatagcattagtgatgaagatgtcgctgctattgaggcctcagcgtgcccgacttgtgggtcgtgctctggcatgttcactgccaactcgatgaattgcttgaccgaagcattaggattggcattaccgggtaatggctcgctattggcaacccattcgctacgtcgcgagctattcctagaagcgggtcgtactatcgtgtcactagccaaacgtcgctacgagcaagatgatgattcagtcctaccgcgctctatcgctactaaagccgcgtttgaaaatgccatgactttagacatcgccatgggcggctctaccaatactattttgcatttgcttgctgctgcacatgaagccgaagtcgacttcaaaatgcacgatattgaccgtttaagtcgtggcgtcccttgtttggctaaagttgcccctgcttcacaaaagtatcatatggaagatgtgcatcgtgctggtggtgtctttgcgctattggccgagcttgaccgtgctggtttgctgcataccgatttgccaactatccatagtgccacgatgaaagaagcgattgataaatgggatattatgaatcctgacaatcttgaagcacgtgcacgctatattgcagcccctggtggcgtacggacgactgaggctttctcacaatcaaaagaatggtcaaatctggatgtgaaccgagagtcaggctgtatccgaagtgcccaacatgcttattcaactgatggcggtcttgccgttctatacggaaacattgctgagcgtggctgtgtggtcaaaactgccggcgttgatgacagcatcttggttttcaccggacgtgcacgcatctttgaatcacaagatgatgcagtagcagcggtgcttgatgatcaaatcgtcgcaggcgatgtagttatcatccgttttgagggtccaaaaggcggtcctggtatgcaagagatgctctacccgacgacttatctaaaatctaaaggcctaggcaaagaatgtgcgctgcttacagatggtcgcttctctggtgggacatcaggcttgtctattggtcatgccagcccagaagccgctgaaggcggcgccattggcctagtgcaagaaggcgatactatccatattgatatcccaaaccgtaccatcaatatgcaggtcagtgatgaagagttagctgctcgccgcgaagaaatggaaagtcgtggacgtgatgcttggaaacccgttagccgtgagcgtcatgtctctcctgctttacgtgcctatgctgcaatgaccaccagtgccgatacgggcgctgtacgtgacgtcagccaagttgaacgttag

SEQ ID NO: 504 - protein, 636 aa, Psychrobacter cryohalolentis
MDYNSKTSTGGRNMAGARALWRATGMTDGDFGKPIIAIANSFTQFVPGHVHLKDLGQMVAREIEKAGGVAKEFNTIAVDDGIAMGHSGMLYSLPSRDLIADSVEYMVNAHCADALVCISNCDKITPGMLMAAMRLNIPVVFISGGPMEAGKIIASTVAHSHNNDGSSDVHSTDSKGNAIRKLDLVDAMMDAADDSISDEDVAAIEASACPTCGSCSGMFTANSMNCLTEALGLALPGNGSLLATHSLRRELFLEAGRTIVSLAKRRYEQDDDSVLPRSIATKAAFENAMTLDIAMGGSTNTILHLLAAAHEAEVDFKMHDIDRLSRGVPCLAKVAPASQKYHMEDVHRAGGVFALLAELDRAGLLHTDLPTIHSATMKEAIDKWDIMNPDNLEARARYIAAPGGVRTTEAFSQSKEWSNLDVNRESGCIRSAQHAYSTDGGLAVLYGNIAERGCVVKTAGVDDSILVFTGRARIFESQDDAVAAVLDDQIVAGDVVIIRFEGPKGGPGMQEMLYPTTYLKSKGLGKECALLTDGRFSGGTSGLSIGHASPEAAEGGAIGLVQEGDTIHIDIPNRTINMQVSDEELAARREEMESRGRDAWKPVSRERHVSPALRAYAAMTTSADTGAVRDVSQVER

SEQ ID NO: 505 - DNA, 1851 bp, Psychromonas sp.
atgcccaaattacgttcagcaactagtacagaaggccgaaacatggcaggcgcgcgtgcattgtggcgcgccactggcgtcaaagataatgattttggaaaacctattattgccattgcgaattcatttacccaatttgttcctgggcatgtacatcttaaaaacatgggtgatttagtggcgggtgcgattgctgaggcgggcggtatctctaaagaatttaataccattgcggttgatgacggcattgcgatgggccattcaggtatgctttatagtttaccttcacgtgacctgattgctgatagtgttgaatatatggtaaatgcacattgtgcggatgctttagtgtgtatttcaaattgtgacaagatcacgccggggatgttgatggcggcattacgccttaatattccggttgtttttgtctcaggtggcccgatggaagcgggtaaaaccaagctttcagataaaattattaagttagatttggtcgatgccatggtggcgggcgcagacgacaggatctccgacgctgacagtgcacaaattgagcgcagtgcttgcccaacgtgtggctcttgctctggtatgtttaccgctaactccatgaactgtctaacggaagtcttagggttatcactacccggtaatggcactatgcttgcaacgcacgcagacagacgcgctcttttcttagaagcgggaaagtgcattgtggcattaacgaaacgttattatgacgatgacgatgagtctgttttaccgcgtaatattgccaattttaaagcctttgaaaacgccatgacacttgatattgcgatgggaggctcaagtaatacggtgctgcatttattagctgctgcccaagaagcgcatattgattttaacatggatgatattgatagaatttcacgcttagtgcctcatttgtgcaaagttgccccctctacacctaaatatcatatggaagatgtgcaccgcgcaggtggggtaatgggtattttaggcgaattggacagagccggccttattcataatgacgctaatcatgtggcgggcagtagtttaaaagcggtattagagaaatgggatattgtgcaaactaaagaggcgagtgtgcgtgatttttaccgcgcaggtccgggaggtattccaactcagcaagcttttagtcaggatagtcgctgggatagtgtggatgatgacaggcagaatggctgtattcgtaaacgtgaatttgcgtttagccaagaaggcggacttgccgtgctggcgggtaatattgcgccaaagggctgtattgttaaaacggcgggggtcgatgaagaagagcatcaatttaccggtacggcgcgcgtgtttgagagccaagatgatgcagtgagcgccatcttagcgggaaaagtgattgcgggtgatgtggttgtcattcgttatgaaggccccaaaggtggccccggcatgcaagaaatgttgtatcccaccagttatttaaaatcacgtgggttaggtaaatcatgtgccttaataaccgacggacgattttcgggtggaacctcgggcttatcgattgggcatatttctccagaggctgcagcgggcggtaatattgccttgattgagacgggtgatgttatcaaaattgatattcctgcacgcagtattcaccttgatattagtgatgaagagctcaagttacgccataaaaatatgctagcgcgcggtaaacttgcttggaaacccgtttcgagaaaacgtattgtgccactcgcgcttaaagcttacgctttgctggtgaccagtgcagataaaggggcggttcgtgacgcttcaatgttggaggattaa

SEQ ID NO: 506 - protein, 616 aa, Psychromonas sp.
MPKLRSATSTEGRNMAGARALWRATGVKDNDFGKPIIAIANSFTQFVPGHVHLKNMGDLVAGAIAEAGGISKEFNTIAVDDGIAMGHSGMLYSLPSRDLIADSVEYMVNAHCADALVCISNCDKITPGMLMAALRLNIPVVFVSGGPMEAGKTKLSDKIIKLDLVDAMVAGADDRISDADSAQIERSACPTCGSCSGMFTANSMNCLTEVLGLSLPGNGTMLATHADRRALFLEAGKCIVALTKRYYDDDDESVLPRNIANFKAFENAMTLDIAMGGSSNTVLHLLAAAQEAHIDFNMDDIDRISRLVPHLCKVAPSTPKYHMEDVHRAGGVMGILGELDRAGLIHNDANHVAGSSLKAVLEKWDIVQTKEASVRDFYRAGPGGIPTQQAFSQDSRWDSVDDDRQNGCIRKREFAFSQEGGLAVLAGNIAPKGCIVKTAGVDEEEHQFTGTARVFESQDDAVSAILAGKVIAGDVVVIRYEGPKGGPGMQEMLYPTSYLKSRGLGKSCALITDGRFSGGTSGLSIGHISPEAAAGGNIALIETGDVIKIDIPARSIHLDISDEELKLRHKNMLARGKLAWKPVSRKRIVPLALKAYALLVTSADKGAVRDASMLED

SEQ ID NO: 507 - DNA, 1824 bp, Deinococcus radiodurans
atgccgacttaccgttccagaaccaccaccgagggccgtaatatggccggcgcccgtgccctgtggcgcgccaccggcatgaccgacggcgatttccagaagccgatcatcgcggtggtcaactcgttcacccagttcgtgccggggcacgtgcacctcaaggacctcgggcaactcgtcgcgggtgaaatcgcggcggcgggcggcgtggcgaaggagttcaacaccatcgccgtggacgacggcatcgccatgggccacgacgggatgctctactcactgcccagccgcgaaatcatcgccgacagcgtggagtacatggtcaacgcccactgcgccgacgcgatggtttgcatctccaactgcgacaagattacccccggcatgctgatggccgcgctgcgcctcaatatccccaccgtgttcgtctcgggcgggccgatggaagcgggcaaggtcaagctcggtgacggcgagcacgcgctggacctggtggacgcaatggtgatggccgccgacgacagcgtgagcgaggaagacatcgaactggtggagcgctcggcctgccccacctgcggctcgtgctcgggcatgttcaccgccaactcgatgaactgcctgacggaggcgctgggcctctcgctgccgggcaacggctcggtgctggcgacccactccgaccgccagaacctgttcaagcgcgccgggcacctgatcgtggacctcgccaagcgctactacgagggcgatgacgagagcgtgctgccgcgcagtgtcgccacctacgacgccttcgagaacgccatgaccctcgacatctcgatgggcggctcgaccaatacggtgctgcacctgctggccgccgcgcacgaggccggggtggatttcaccatgcaggacatcgaccagctctcgcggcgggtgccggtgctgtgcaaggtggcgcccgccaagaacgacgtgcacatggaagacgtgcaccgcgctgggggcatcatgggcattctgggcgagcttgaccgcgccgggctgctgaagaccgacgtgagcaccgtacacgcccccagcatgagcgccgccctgaacgagtgggacgtggtccgcaatgagaaccaccacgagttctaccgcgccgcgcccggcggcattcccaccgtcttcgccttctcgcagtcgcgccgttaccgcgaactcgacaccgaccgggaagcaggcgtcattcgcagcgccgagcacgctttctcgcaggacggcgggctggcggtgctgtacggcaacctcgccgaagacggctgcatcgtcaagacggcgggcgtggacgaatccatcctgaagttcagcggcccggcgcgcgttttcgagtcgcaagacgcctcggtggacgccatcctcagcggcgaagtcaaggaaggcgaggtcgtgctgattcgctacgaaggcccacgcggtggccccggcatgcaggaaatgctctacccgacgagctacctcaagtccaaggggctgggcaaagcctgcgcgctggtcaccgacggtcgtttctcgggcggcagcagcggcctgagcatcggccacgtctcgcccgaggcggcggagggcggcaccatcggcctggtcgagacgggcgacctcatcgaaatcgacatcccgaaccgcaccattcacctcgccgtgccggacgctgaactcgccgcccgccgccagaagcgcgaggaagaaggctggcaccccgccgaaccccggccccgcaaaatcaccgctgccctacgcgcctatgcgtctatgacgacgagcgcttcgcggggcgcggtgcggaatatctga

SEQ ID NO: 508 - protein, 607 aa, Deinococcus radiodurans
MPTYRSRTTTEGRNMAGARALWRATGMTDGDFQKPIIAVVNSFTQFVPGHVHLKDLGQLVAGEIAAAGGVAKEFNTIAVDDGIAMGHDGMLYSLPSREIIADSVEYMVNAHCADAMVCISNCDKITPGMLMAALRLNIPTVFVSGGPMEAGKVKLGDGEHALDLVDAMVMAADDSVSEEDIELVERSACPTCGSCSGMFTANSMNCLTEALGLSLPGNGSVLATHSDRQNLFKRAGHLIVDLAKRYYEGDDESVLPRSVATYDAFENAMTLDISMGGSTNTVLHLLAAAHEAGVDFTMQDIDQLSRRVPVLCKVAPAKNDVHMEDVHRAGGIMGILGELDRAGLLKTDVSTVHAPSMSAALNEWDVVRNENHHEFYRAAPGGIPTVFAFSQSRRYRELDTDREAGVIRSAEHAFSQDGGLAVLYGNLAEDGCIVKTAGVDESILKFSGPARVFESQDASVDAILSGEVKEGEVVLIRYEGPRGGPGMQEMLYPTSYLKSKGLGKACALVTDGRFSGGSSGLSIGHVSPEAAEGGTIGLVETGDLIEIDIPNRTIHLAVPDAELAARRQKREEEGWHPAEPRPRKITAALRAYASMTTSASRGAVRNI

SEQ ID NO: 509 - DNA, 1680 bp, Wolinella succinogenes
atgagaagtagcatcattaaagaggggtatcaaaaggcgccacaccgaagcttgctgagggcaacggggctcaaagacgaggattttggtaagccattcattggcgtggccaacagctatattgacatcattccgggtcactttttcttgcaagagtatggccgaatcattaaagaggagattagggccgcgggcggaatcccttttgagtttaacactatcggggtggatgatggaatcgccatggggcatgatggaatgctctatagtttgcccagtcgagagctgattgctgattgtattgagacggtgatgaatgcccataaactggacgccatgatctgtatccctaattgcgacaagattgtccctgggatgcttctgggggcactcagagtgaatgtgcccacggtgtttgtgagtggcggaccgatgaaggcaggtcgcctcaaggatggcaccaaagtggatttggcgagtgcttttgaggcggtgggtaaacgcgcgaggaatcagattagcgatgaagagctccgcgagattgagtgcgccgcctgtccggggggaggaagctgcagtggaatgttcacggcgaactccatgaacacactctgtgaagcgatgggagtggcgcttcccgggaatgggacgattccagccctcaccaaagagcgtgaggagctcatccgaaaagccgcaagaagaatcgtagaaatcgcactagatgagcgctacgccttccgcaatattctcaacaaagaggcgattcacaatgcttttgttgtggatatggcgatggggggaagcaccaataccgtacttcatatgatggccattgccaaagagagagaggcggattttgatttgcgcaaaatcaatgagatcgccaaagaggtgagtcatatcgccaaaatctcccctgcactctacactgtccacatggaagacatcaatagagccgggggcgtgaatgcggtcatgaatgagatcaatcgccgaggcggagtgctcaagacagaggcgctcaccgtgagtggcgagagcatgggtgagaggatcgcgggggcgaagattttagatacgcaaatcattcacacgcttgagaatccctatagcgcggtggggggattgaagattctttatggaaatcttgccgagcagggcgctgtgctcaagaccgctgccatggacgctaagatgagaaaattcactggaaaggcagtctgctttgattctcaagaggaggcgatcgcaggtattgtcgggggcaaggtcaaagagggggatgtggtggtgatccgctacgaaggacccaaggggggaccgggaatgcaggagatgctaagtcccacaagcctcatcatggggatgaatttaggagacaaagtcgcgctcattaccgatggccgtttcagcggcgccacgcgtggcgcttgcatcgggcatgtgagtcccgaagcggccgaagggggaatgatcggactgcttcaagagggcgatcttattcgaatcgatgtcgaagaaggggttttggaggtgttgcttgaggaggcggagatccaaaagcgacgcgcctcctttagtcctaaaactaaaaccgttgcctccaagtggctcaaacgctaccagcttctcgtgagcaatgccgcttcaggcgctattttgaaaacggagctataa

SEQ ID NO: 510 - protein, 559 aa, Wolinella succinogenes
MRSSIIKEGYQKAPHRSLLRATGLKDEDFGKPFIGVANSYIDIIPGHFFLQEYGRIIKEEIRAAGGIPFEFNTIGVDDGIAMGHDGMLYSLPSRELIADCIETVMNAHKLDAMICIPNCDKIVPGMLLGALRVNVPTVFVSGGPMKAGRLKDGTKVDLASAFEAVGKRARNQISDEELREIECAACPGGGSCSGMFTANSMNTLCEAMGVALPGNGTIPALTKEREELIRKAARRIVEIALDERYAFRNILNKEAIHNAFVVDMAMGGSTNTVLHMMAIAKEREADFDLRKINEIAKEVSHIAKISPALYTVHMEDINRAGGVNAVMNEINRRGGVLKTEALTVSGESMGERIAGAKILDTQIIHTLENPYSAVGGLKILYGNLAEQGAVLKTAAMDAKMRKFTGKAVCFDSQEEAIAGIVGGKVKEGDVVVIRYEGPKGGPGMQEMLSPTSLIMGMNLGDKVALITDGRFSGATRGACIGHVSPEAAEGGMIGLLQEGDLIRIDVEEGVLEVLLEEAEIQKRRASFSPKTKTVASKWLKRYQLLVSNAASGAILKTEL

SEQ ID NO: 511 - DNA, 1857 bp, Zymomonas mobilis
atgcctccctatcgttccagaaccacgactcatggtcgtaatatggcgggtgccagaagtttatggcgcgcaaccggcgtcaaaaatgaagattttggtaagccgattatcgctgttgccaacagctttacgcaatttgtccccggtcatgtccatttaaaggatatgggacagcttgttgctgaagaaattgaaaaagctggcggtatcgccaaagaattcaatacgattgcgattgatgatggtatcgcgatgggacatggcgggatgctttattccttgccgtctcgggaattgattgccgattccgtcgaatatatggtcaacgcccattgtgctgatgctttggtctgtatttccaactgcgacaagattacgcctggtatgttgatggcttcgatgcgcctgaatatcccgacagttttcgtctctggtggacctatggaagccggtaaagccgaggtcaaaggcgtcaagcgggcgcttgatctgatcgatgctatggtgattgctgccgatgaccattacagcgatggtgaagtcgaagttatcgagcagacggcttgcgctacctgcggttcctgttccggtatgtttacggccaattcgatgaattgcctgaccgaggccttggggctttctttcccaggtaatggttcgatgcttgcgacccatagcgatcgggaacagcttttccgcaaggctgggcataccattgttgatatggcgcgcagctattatgagcaggatgatgccgctgtattaccgcgttcaattgccacgcttgaggcttttgaaaatgcgatgagtcttgatatcgccatgggtggttccaccaatacggttttgcatctgttggcggtcgcgcaggaaggcaacgtgcctttcactatggcggatattgatcgtctttcccgtcatgtcccttgcttatgcaaggtcgcaccggccaaaaatgatgtccatatggaagatgttcatcgggcagggggcgttatggccattttaggccagcttgatcgtgccggattgatcaataccagcttgcgcaccattcattctccgactttaggcgcagcattggacgcatgggatatcagccgtgacagttgttctgaagaagcgcagttattctatcgcgcggctccggggggtgttccgactcaaaaggctttcagccagtcttctcgctatgaagcgctggatactgaccgcgaaaaaggtgtgattcgttctaaaaatcatgctttttcgacggatggtggtctggccgtcttatttggcaatcttgctcctgaaggcagtattgtcaaaactgccggtgtggatgagtctattctgaaattcaccggtaaagccaaggtttacgaaagtcaggaagccgccgttgccggtattcttggcaatgatgtcgaagctggtgaagtggtgatcgttcgctatgaaggtcccaaaggtggccccggtatgcaggaaatgctgtatccgaccagctatctgaaatcgaaaggtttgggtaaactctgcgctctgattaccgatggtcgtttttctggtggtagctctggtttatccatcggccatgtttctcctgaagcggccgagggcggcttgatcgctttggtcgaaaccggtgatacaattgttatcgatattcctgaacggattatccatctggatgttgatgatgctgttattgccgatcgtcatgcccgcatggaagccaagggggcggcagcatggaaaccgcaaaaccgtaatcgtccgatttcttcggctttgaaagcctatgcagctttgacgacaaacgctgcccgtggggcagttcgagatgtcaatcagctcgaacggcgttaa

SEQ ID NO: 512 - protein, 618 aa, Zymomonas mobilis
MPPYRSRTTTHGRNMAGARSLWRATGVKNEDFGKPIIAVANSFTQFVPGHVHLKDMGQLVAEEIEKAGGIAKEFNTIAIDDGIAMGHGGMLYSLPSRELIADSVEYMVNAHCADALVCISNCDKITPGMLMASMRLNIPTVFVSGGPMEAGKAEVKGVKRALDLIDAMVIAADDHYSDGEVEVIEQTACATCGSCSGMFTANSMNCLTEALGLSFPGNGSMLATHSDREQLFRKAGHTIVDMARSYYEQDDAAVLPRSIATLEAFENAMSLDIAMGGSTNTVLHLLAVAQEGNVPFTMADIDRLSRHVPCLCKVAPAKNDVHMEDVHRAGGVMAILGQLDRAGLINTSLRTIHSPTLGAALDAWDISRDSCSEEAQLFYRAAPGGVPTQKAFSQSSRYEALDTDREKGVIRSKNHAFSTDGGLAVLFGNLAPEGSIVKTAGVDESILKFTGKAKVYESQEAAVAGILGNDVEAGEVVIVRYEGPKGGPGMQEMLYPTSYLKSKGLGKLCALITDGRFSGGSSGLSIGHVSPEAAEGGLIALVETGDTIVIDIPERIIHLDVDDAVIADRHARMEAKGAAAWKPQNRNRPISSALKAYAALTTNAARGAVRDVNQLERR

SEQ ID NO: 513 - DNA, 1659 bp, Clostridium acetobutylicum
gtgaattctgataaggcaatgaaaggagtagaaagagctccccacagatctctttttaaggctttaggttttatagatgaggaaatggatagacctcttataggaatagctaattcttacagcgaacttataccaggtcatatgaatcttgataaaatagttaaggctgtaaaagatggaataagaatggcaggaggtgttcctgtagaatttggaaccattggagtttgtgatggtatttctatgaatcataagggaatgagttattctcttccatcaagacagattatagcagatagtgttgagatcgtggctaaagcacatgctcttgatgggcttgtacttgtgccaaattgcgataaggtagttccaggaatgcttatggcggctggaagagttaacataccttcaatagtaataagtggaggaccaatgctttctggtagaacaaatggaagggtcacagatctaaactctgtattcgaagcagttggagcagtttcagcgggaaaaatgtctttagaagaattagctgagcttgagaatacggcatgccctacttgtgggtcttgttctggaatgtttacagcaaattcaatgaactgtctttctgaggttttaggtcttgcgcttccttacaatggaactataccagctgtattttcagaaagattaagacttgctaaaaaggcaggtatgaaaatagttgaattggttcaaaaggacataagaccaagtgacatacttacagaagctgcatttatgaatgcagtcgcaatggatatggcactagggggttctactaattcacttcttcatttaccagctatagcttatgaatgtgacgtggatattaatttcgataaaataaatgagataagtgaaaagattccgcatgtgtgtaagttaagtcctgcaggatttcatcacatagaggacttgcatatggcaggtggaataccggctgttgttaatggaattataaaaaaaggacttctaaatggagagtgtatgacagttacaggtaaaactttgtatgagaatgtgaaggatgcgaaaatcaaaaacattgatgtaataagaatagataatccttatagtgagacaggtggactttcagtattgagaggaaatttagctccagatggcgctatagttaaaaaggcagcagtagcacccgaaatgatgcagcatactggtccggctagggtatttaatagtgaagaggaagtttctaaggcaatacttggtggaaaaataaatccaggtgatgttgttgtgataaggtatgagggccctaagggtggaccaggaatgaaggaaatgctttcgccaacagcttcacttgcaggaatgggacttgataagagtgtggcgcttataactgatggaagattctcaggtgctacaagaggagcatccattggacatgtatctccagaagcggcagaaggtggtccaatagggttggttgaagagggagacacaattgaaatagatattgaaaagaaaactataaacctacttgttccggaagaaaaattaaaaaacagaaaaccggaaaaggttgaaaaacctgtgaagggatatttaaatacgtataggcagggggtatcatctgcttgtacaggagcagtttttcatagtacaaaggagtga

SEQ ID NO: 514 - protein, 552 aa, Clostridium acetobutylicum
MNSDKAMKGVERAPHRSLFKALGFIDEEMDRPLIGIANSYSELIPGHMNLDKIVKAVKDGIRMAGGVPVEFGTIGVCDGISMNHKGMSYSLPSRQIIADSVEIVAKAHALDGLVLVPNCDKVVPGMLMAAGRVNIPSIVISGGPMLSGRTNGRVTDLNSVFEAVGAVSAGKMSLEELAELENTACPTCGSCSGMFTANSMNCLSEVLGLALPYNGTIPAVFSERLRLAKKAGMKIVELVQKDIRPSDILTEAAFMNAVAMDMALGGSTNSLLHLPAIAYECDVDINFDKINEISEKIPHVCKLSPAGFHHIEDLHMAGGIPAVVNGIIKKGLLNGECMTVTGKTLYENVKDAKIKNIDVIRIDNPYSETGGLSVLRGNLAPDGAIVKKAAVAPEMMQHTGPARVFNSEEEVSKAILGGKINPGDVVVIRYEGPKGGPGMKEMLSPTASLAGMGLDKSVALITDGRFSGATRGASIGHVSPEAAEGGPIGLVEEGDTIEIDIEKKTINLLVPEEKLKNRKPEKVEKPVKGYLNTYRQGVSSACTGAVFHSTKE

SEQ ID NO: 515 - DNA, 1671 bp, Clostridium beijerinckii
atgagaagtgatgtaataacaaaaggatctaaaagtgcacctcaacgttcattgcttagtgccttaggtttaacaaaagaagaaatggaaaggcctcttgtaggtatcgtgagctcacaaaatgatatcgttcctggtcatatgaatttagacaaaatagttgaagctgtaaaaatgggagtttcaatggctggaggtactccaattgtctttcctgcaattgctgtttgtgacggtattgctatggggcatgaaggaatgaaatattcattagttacaagagatttaattgcagattctactgaagctatggcaatggctcatgcctttgatgcattagtaatggttcctaattgtgataaaaatgttcctggccttctaatggctgcagcaagagttaatattcctacaatttttgtaagtggcggaccaatgcttgccggaaaagttgacggatgtaagacaagcttatcaagtatgtttgaagctgttggcgcttacaatgctggaaaaattacagctgaaaaattagatgaatatgaaaacaacgtatgccctacttgtggttcttgttcaggaatgtatactgcaaatagtatgaactgtttaacggaagtacttggtatgggccttcaagggaatggtacaatccctgcagtttattcagaaagaataaaacttgcaaagcatgctggcatgaaaatcatggaattacttgaaaagaacataagaccaagagatattatgacagaagatgcatttatgaatgctatgactatggacatggctcttggctgtagtaccaatagtatgttgcatttacctgcaattgcacacgaagttggctttgatttaaatgttgatatagctaatgaaattagttcaaaaacaccgaatctttgccatcttgctcctgctggacacacttatattgaagatttaaatgatgctggtggaatttatgctgttatgaatgaaataaataagcttggtttattaaaaactaaccttataacatgtacaggaaaaactgttggtgaaaacattgaaggatgcataaataaaaatcctgaagttattagaccagtcaaaaatccatatagtcaaactggtgggattgcagttcttaaaggaaatctagcacctgattcatgtgtcgttaagcgttcagccgttgtaccaaaaatgttaaagcatgaaggtccagctaaagtgtttgattgcgaagaagatgcccttgaagcaataaatacaggaaaaattgttgctggagatgttgttgttatcagatatgaaggacctaaaggaggccctggcatgagagaaatgcttaatccaacttctgcaattgcaggaagaggtcttggaagttccgttgctcttataacagatggacgttttagtggcgctagcagaggtgcttcaatcgggcacgtttctccagaggcggcagtaggtggtaacatagcattagttgaggatggagatatgatccaaattgatattaacgctaacactattaacttcttagttagcgatgaagaattagcaagaagaaaagcaaattggaaaccaagaaaaccaaaaataactacaggttatctagcaagatacgctgctcttgttacatcaggaaatagaggtgctatcctagacatccctaaattttaa

SEQ ID NO: 516 - protein, 556 aa, Clostridium beijerinckii
MRSDVITKGSKSAPQRSLLSALGLTKEEMERPLVGIVSSQNDIVPGHMNLDKIVEAVKMGVSMAGGTPIVFPAIAVCDGIAMGHEGMKYSLVTRDLIADSTEAMAMAHAFDALVMVPNCDKNVPGLLMAAARVNIPTIFVSGGPMLAGKVDGCKTSLSSMFEAVGAYNAGKITAEKLDEYENNVCPTCGSCSGMYTANSMNCLTEVLGMGLQGNGTIPAVYSERIKLAKHAGMKIMELLEKNIRPRDIMTEDAFMNAMTMDMALGCSTNSMLHLPAIAHEVGFDLNVDIANEISSKTPNLCHLAPAGHTYIEDLNDAGGIYAVMNEINKLGLLKTNLITCTGKTVGENIEGCINKNPEVIRPVKNPYSQTGGIAVLKGNLAPDSCVVKRSAVVPKMLKHEGPAKVFDCEEDALEAINTGKIVAGDVVVIRYEGPKGGPGMREMLNPTSAIAGRGLGSSVALITDGRFSGASRGASIGHVSPEAAVGGNIALVEDGDMIQIDINANTINFLVSDEELARRKANWKPRKPKITTGYLARYAALVTSGNRGAILDIPKF

SEQ ID NO: 517 - DNA, 1842 bp, Pseudomonas fluorescens
atgcctgattaccgctcgaaaacatccacccatggccgcaacatggccggcgcccgcgccctgtggcgcgccacggggatgaaagatgacgacttcaagaagccgatcatcgccattgccaactccttcacccagttcgtcccggggcacgtgcacctgaaggacctgggccagctggtggctcgcgagatcgaacgcgccggtggcgtggccaaggaattcaacaccatcgccgtggacgacggcatcgccatgggccatgacggcatgctgtattcgctgccgagccgcgagatcatcgccgactccgtggagtacatggtcaacgcccactgtgccgacgccatcgtgtgcatttccaactgcgacaagatcacccccggcatgctgatggccgccctgcgcctgaacatcccggtgatcttcgtttccggcggcccgatggaagccggcaagaccaagctcgccagccatggcctggacctggtggacgccatggtcatcgccgccgactccagcgcttctgacgagaaggttgccgagtacgagcgcagcgcctgcccgacctgcggttcatgctccggcatgttcaccgccaactccatgaactgcctgaccgaagccctggggctcgccctgccgggcaacggttcgaccctggccacccacagcgatcgcgaagagctgttcctgcgggccgggcgcaccatcgtcgagctgtgccagcgctactacggcgacaacgacgagtcggtcctgccgcgcaacatcgccaacttcaaggcgttcgagaacgccatgaccctggatatcgccatgggcggttccaccaacaccatcctgcacctgctggccgccgcccaggaagccgagatcgacttcgacctgcgggacatcgatcgcctgtcgcgccacgtgccgcagctgtgcaaagtggcgccgaacatccagaagtaccacatggaagacgtgcaccgcgccggcggtatcttcagcatcctcggcgaactggcccgtggcggcctgctgcacaccgacctgcccaccgtgcacagcaagaccatggccgaaggcatcgcccagtgggacatcacccagaccagcgacgaagccgtgcatcacttcttcaaggccggcccggcgggcatcccgacccagacggcgttcagccagtcgacccgttgggacagcctcgacgatgaccgtgaaaacggctgcatccgcagtgtcgagcatgcctactcgaaagaaggcggcctggccgtgctctacggcaacatcgccctggacggctgcgtggtgaagaccgccggtgtcgacgagtcgatccatgtcttcgaaggcaacgccaagatcttcgagagccaggacagcgcggtgcgcggcatcctcgccgacgaggtgaaggaaggcgacatcgtgatcatccgttacgaaggcccgaaaggcggcccgggcatgcaggaaatgctctatccgacctcctacctgaagtccaagggcctgggcaaagcctgcgccctgctcaccgacggccgcttctccggcggcacctcgggcctgtccatcggccacgcctcgcctgaagcggcagccggtggcaccatcggcctggtgcaggacggcgacaaggtactgatcgacattcccaaccgctcgatcaacctgttggtcagcgacgaggaactggcggcccgccgtgtcgagcaggacaagaaaggctggaaaccggtggaagcacgcccgcgcaaggtgaccaccgcgctgaaggcctacgccctgctagccaccagcgccgacaagggtgcggtgcgcaacaaggccatgctcgacggcctgtga

SEQ ID NO: 518 - protein, 613 aa, Pseudomonas fluorescens
MPDYRSKTSTHGRNMAGARALWRATGMKDDDFKKPIIAIANSFTQFVPGHVHLKDLGQLVAREIERAGGVAKEFNTIAVDDGIAMGHDGMLYSLPSREIIADSVEYMVNAHCADAIVCISNCDKITPGMLMAALRLNIPVIFVSGGPMEAGKTKLASHGLDLVDAMVIAADSSASDEKVAEYERSACPTCGSCSGMFTANSMNCLTEALGLALPGNGSTLATHSDREELFLRAGRTIVELCQRYYGDNDESVLPRNIANFKAFENAMTLDIAMGGSTNTILHLLAAAQEAEIDFDLRDIDRLSRHVPQLCKVAPNIQKYHMEDVHRAGGIFSILGELARGGLLHTDLPTVHSKTMAEGIAQWDITQTSDEAVHHFFKAGPAGIPTQTAFSQSTRWDSLDDDRENGCIRSVEHAYSKEGGLAVLYGNIALDGCVVKTAGVDESIHVFEGNAKIFESQDSAVRGILADEVKEGDIVIIRYEGPKGGPGMQEMLYPTSYLKSKGLGKACALLTDGRFSGGTSGLSIGHASPEAAAGGTIGLVQDGDKVLIDIPNRSINLLVSDEELAARRVEQDKKGWKPVEARPRKVTTALKAYALLATSADKGAVRNKAMLDGL

SEQ ID NO: 519 - DNA, 1653 bp, Methanococcus maripaludis
atgataagtgataacgtcaaaaaaggagttataagatctccaaaccgagctcttttaaaagcttgcggatattcagacgaagacatggaaaaaccatttattggtgttgtaaacagcttcacagaagttgttcctggccacattcacttaaaaacattatcagaagcagttaaacatggtgtttatgcaaacggcggaacgccatttgaatttaatacaattggaatttgcgacggtattgcaatgggtcatgaaggtatgaaatactccttaccttcaagagaaatcattgcagatgctgttgaatcaatggcaagagcacacggttttgatggccttgttttaattcctacgtgtgataaaatcgttcctggaatgataatgggtgctttaagattaaatattccatttatcgtagttactgggggaccaatgcttccaggcgaattccaaggtaaaaaatgcgaacttattagtctttttgaaggggttggtgagtatcaggttggaaaaattactgaagaagaattaaaaagtattgaagaatgtgcgtgcccgggtgctggaagctgtgcagggctttacactgcaaacagtatggcatgccttacagaagctctcggactatctcttccaatgtgtgcaacaatacatgcggttgatgctcaaaaggttagaatcgctaaaaaaactggctctaaaattgttgacttggtaaaagaagatgtaaaaccaacagatatattgacaaaggaagcttttgaaaacgctattttagttgaccttgcacttggtggatcgacaaatacaacattacacattcctgcaattgcaaatgaaattgaaaataaattcataactctcgatgactttgatagattgagcaacgaagttccacacattgcatcaatcaaacccggtggagaacactacatgattgacctccataatgcaggaggtattcctgcagtattaaatgttttaaagggaaaaattagagatacaaaaacggttgacggaagaagtactttagaaattgcagaatctgtcaaatacataaattacgacgttataagaaaagtagaagctccagttcacgaaactgccggtttgagagttttaaaaggaaatcttgctccaaacggttgcgttgtaaaaatcggtgcagtaaatccaaaaatgtacaaacacgatggacctgcaaaagtttacaattcagaagatgaagcaatttctgcgatactcggtggaaaaattgtagaaggcgacgttatagtaattagatacgaaggaccatcaggtggcccgggaatgagagaaatgctctccccaacttcagcaatctgtggaatgggtcttgatgacagcgttgcattaattactgacggaagattcagtgggggaagcagaggtccatgtataggccacgtttctccagaagctgctgctggcggagtaattgctgcaattgaaaacggagatatcatcaaaattgacatgattggaaaagaaataaatgttgatttggatgaatcagtaattaaagaaagactttcaaaattggatgaatttgagcctaaaatcaaaaaaggctatttatcaagatattcaaggctcgtttcttcagctgatgaaggagcggttttaaaataa

SEQ ID NO: 520 - protein, 550 aa, Methanococcus maripaludis
MISDNVKKGVIRSPNRALLKACGYSDEDMEKPFIGVVNSFTEVVPGHIHLKTLSEAVKHGVYANGGTPFEFNTIGICDGIAMGHEGMKYSLPSREIIADAVESMARAHGFDGLVLIPTCDKIVPGMIMGALRLNIPFIVVTGGPMLPGEFQGKKCELISLFEGVGEYQVGKITEEELKSIEECACPGAGSCAGLYTANSMACLTEALGLSLPMCATIHAVDAQKVRIAKKTGSKIVDLVKEDVKPTDILTKEAFENAILVDLALGGSTNTTLHIPAIANEIENKFITLDDFDRLSNEVPHIASIKPGGEHYMIDLHNAGGIPAVLNVLKGKIRDTKTVDGRSTLEIAESVKYINYDVIRKVEAPVHETAGLRVLKGNLAPNGCVVKIGAVNPKMYKHDGPAKVYNSEDEAISAILGGKIVEGDVIVIRYEGPSGGPGMREMLSPTSAICGMGLDDSVALITDGRFSGGSRGPCIGHVSPEAAAGGVIAAIENGDIIKIDMIGKEINVDLDESVIKERLSKLDEFEPKIKKGYLSRYSRLVSSADEGAVLK

SEQ ID NO: 521 - DNA, 1653 bp, Methanococcus aeolicus
atgataagtgataacttaaagaagggagtttccagagctccaaacagaagtttattaaaggcatgcggatatacggacgaagaaatagaaaaaccattcataggtatagtaaatagctttacagaagtagttcccgggcatattcatttaaatacattggcagaagctgcaaaaaagggagtttatgcaaacggcggaacaccttttgaatttaacactatggccgtatgtgatggtatagctatgggacatgagggaatgagatattcattaccatcaagagagataatagctgatacagtagaaagtatggcgaaagctcatggatttgatggattggtgcttattccgtcctgtgataaaattgttcctggtatgattatgggggctctaagattaaatattccattcatagtaataactggcggacctatgcaacctggggagctccacggtaaaaagtatgaccttataagtgtgtttgaaggagttggagaatataatgttggaaaaattacaaaagaggaattaatggaaattgaaacctgtgcctgtccgggagctggtagctgtgctggattatttacggcaaatagtatggcctgtttaaccgaaacacttggtttatcccttcctatgtgtgctactacacatgcaacagatgccgaaaaggtgagaattgcaaaaagaagcggtatgaaaatagttgatttggtaaaagaagatataaaaccaacagatttattaacaaaggaatcatttgaaaatgcaatattggttgatttggctttgggaggttcttcaaatacaacacttcatattccagctttggcttatgaaatagcaccagagtttataactcttgacgattttgataggttatgcgacgaggtgccacatattgcttcattaaggccggggggagaccactttataagcgatttgcatagggcaggaggtattccagctgttttaaaaatattggagcaaaaaataagggatgctaacactgtaagcggtaaatctattaaagagataataaatgaggtaaaatacattgattataatataattagaccagtggataaaccagtgcatgagaccgcaggattaaggatattaaaaggaaatatagcacctgatggctgtgttgtaaaaattagtgctgtaaatccaaagatgtataaacacgaggggcctgcacgggtatttaattcagaggaggaaaccattgacgcaatacttgggggggacattaaagaaggagatgttgttgtaataagatatgaaggtccagcaggaggtccgggaatgagagaaatgttgtctccaacttctgctatttgtggtatgggattagatgactctgttgcacttattacagatggtagatttagtgggggaagtagaggtccatgtattggacatatctcaccagaggcaatggcaggaggtccaatagccataattgaagaaggagatataattgctattgatatgatggcaaaagaaataaacttaaaaataagcgaagaagagataaaagaaagattagctaattggaaaaaaccagaaataaaagttaaaaaaggatatatatcaagatatgctaaattagtatcttcggcaaatgaaggggcagtattgaaataa

SEQ ID NO: 522 - protein, 550 aa, Methanococcus aeolicus
MISDNLKKGVSRAPNRSLLKACGYTDEEIEKPFIGIVNSFTEVVPGHIHLNTLAEAAKKGVYANGGTPFEFNTMAVCDGIAMGHEGMRYSLPSREIIADTVESMAKAHGFDGLVLIPSCDKIVPGMIMGALRLNIPFIVITGGPMQPGELHGKKYDLISVFEGVGEYNVGKITKEELMEIETCACPGAGSCAGLFTANSMACLTETLGLSLPMCATTHATDAEKVRIAKRSGMKIVDLVKEDIKPTDLLTKESFENAILVDLALGGSSNTTLHIPALAYEIAPEFITLDDFDRLCDEVPHIASLRPGGDHFISDLHRAGGIPAVLKILEQKIRDANTVSGKSIKEIINEVKYIDYNIIRPVDKPVHETAGLRILKGNIAPDGCVVKISAVNPKMYKHEGPARVFNSEEETIDAILGGDIKEGDVVVIRYEGPAGGPGMREMLSPTSAICGMGLDDSVALITDGRFSGGSRGPCIGHISPEAMAGGPIAIIEEGDIIAIDMMAKEINLKISEEEIKERLANWKKPEIKVKKGYISRYAKLVSSANEGAVLK

SEQ ID NO: 523 - DNA, 1842 bp, Vibrio fisheri
atgccaacttatcgttcagccaccaccactcacggacgtaacatggccggagcacgcgctttatggcgtgcaactggcgttaaagaagatgactttggtaaacccatcattgctgttgttaactcatttactcaatttgttccgggtcacgtacatcttaaagacatgggacaacttgttgctggcgaaatagaaaaagccggcggtatcgccaaagagtttaatactatcgccgttgatgatggtatcgctatgggtcacggtggcatgctttattctctgccatcacgcgaactcattgcagactctgttgaatacatggttaatgctcactgtgctgatgctatggtatgtatttctaactgcgacaaaattaccccaggaatgatgatggctgcaatgcgtcttaacattccagtaatttttgtgtcaggcggcccaatggaagcaggaaaaactaagctttcagatcaaataatcaaactggatcttgttgatgcaatgatccaaggtgccgatcctacggtttccgatgctcaaagtgagcagatcgagcgttcagcttgtccaacttgtggatcgtgttcaggaatgttcacggctaactcaatgaactgtttaaccgaagcgctcggtttatctcaaccaggtaatggctcaatgctcgctactcacgccgaccgcgagcagctgtttattaatgcaggtaaacgtattgttgaattaacaaagcgttattatgagcaagatgatgaatcagcacttccaagaaatattgccgaccgtgctgcatttgaaaatgccatggcacttgatatcgcaatgggtggttctagtaataccgttcttcaccttttagcttctgctcaagaaggcgaaattgatttcgatatgggtgacattgatgagatgtctcgtcgagtacctcacttgtgtaaagtcgctccatcaacgcctaaatatcatatggaagatgttcaccgagcaggtggtgtaatggctatccttggtgagttagatagagctgggcttctgaataatcaaacaaaaacggttcttggcttaaccatgcaagagcaacttgcacaatacgatattatgcaaactgaagacgaagagatccttaaattcttccgtgcaggacctgcagggatccgaacaacaaaagcattctcgcaagattgccgttgggatcgccttgatgacgaccgaaaagaagggtgtattcgaaccaaagaaaatgcctttagccaagaaggtggtctcgccgttctatctggcaatatagcggttgatggttgtattgtaaaaaccgccggcgttgatgaagaaaatctaaagttccaaggtccagccattgtttttgaaagccaagactcagcggtagaaggcattttaggtggaaaagttaaagcgggtgaagtcgttgttattcgctacgaaggtccaaagggtggtccaggtatgcaagaaatgctttacccaaccacttacttgaaatcaatgggcttaggcaaagcatgtgcgcttctaactgatggtcgattctctggtggtacatcaggcctatctataggtcacgcatctccagaagctgcaagtggtggcacaataggtttagttaacgatggtgatatcattaccatcgatatcccaagccgctcaattacgcttgatgtaccagaatcagaactgcaagctcgtcgagcgaaacaagatgaactcggttggaaacctgtgaatcgtcaacgtgaagtctcttttgcattaaaagcctatgcaagtatggcaacaagtgcagataaaggtgctgttcgtgataaatctaagttagaagggtaa

SEQ ID NO: 524 - protein, 613 aa, Vibrio fisheri
MPTYRSATTTHGRNMAGARALWRATGVKEDDFGKPIIAVVNSFTQFVPGHVHLKDMGQLVAGEIEKAGGIAKEFNTIAVDDGIAMGHGGMLYSLPSRELIADSVEYMVNAHCADAMVCISNCDKITPGMMMAAMRLNIPVIFVSGGPMEAGKTKLSDQIIKLDLVDAMIQGADPTVSDAQSEQIERSACPTCGSCSGMFTANSMNCLTEALGLSQPGNGSMLATHADREQLFINAGKRIVELTKRYYEQDDESALPRNIADRAAFENAMALDIAMGGSSNTVLHLLASAQEGEIDFDMGDIDEMSRRVPHLCKVAPSTPKYHMEDVHRAGGVMAILGELDRAGLLNNQTKTVLGLTMQEQLAQYDIMQTEDEEILKFFRAGPAGIRTTKAFSQDCRWDRLDDDRKEGCIRTKENAFSQEGGLAVLSGNIAVDGCIVKTAGVDEENLKFQGPAIVFESQDSAVEGILGGKVKAGEVVVIRYEGPKGGPGMQEMLYPTTYLKSMGLGKACALLTDGRFSGGTSGLSIGHASPEAASGGTIGLVNDGDIITIDIPSRSITLDVPESELQARRAKQDELGWKPVNRQREVSFALKAYASMATSADKGAVRDKSKLEG

SEQ ID NO: 525 - DNA, 1860 bp, Shewanella oneidensis
atgccaaagttacgatcagctaccagtacggaaggccgcaatatggcgggtgcccgtgcgctatggcgcgccaccggggtgaaagacaatgattttggtaagccgattattgcgattgccaactcctttactcagtttgttcccggccatgtgcacttaaaagatatgggctcactggtggcgagtgcgattgaagaggcgggcggtatcgccaaagaattcaatactatcgccgtcgacgatggtatcgccatgggccacggtggcatgctctacagtttgccctcgcgggagctgattgccgatagtgtggagtacatggtcaatgcccactgcgccgatgccttagtgtgtatctccaactgcgacaaaatcactcccggcatgttgatggcggcgctgcgtctcaatattcccgtggtatttgtgtcgggtgggccgatggaagcgggtaaaaccaaactgtcggacaaacttatcaagctcgatttagtcgatgccatggtggcggcggccgactcgagtgtgagcgatgaagatagcgccaaaatcgagcgcagtgcttgcccgacgtgtggttcctgttcgggcatgttcaccgccaactctatgaactgtttgaccgaagccctggggttatcgctgccgggcaacggctccatgctggcaacccatagcgatcgccgcgagctgtttttagaggcgggccggcgcgtgatggcgctgaccaagcgttattacgagcaagatgacacctcggcgctgccgcgtaatatcgcctgctttaaagcttttgagaacgccaccgcattagatatcgccatgggcggttcgtctaatactgtgttgcacttgttagcggcggcgcaggaggcggaagtcgcatttactatggacgatatcgaccgtatgtcgcgccttgtgccgcacctttgtaaagtcgccccatcgacgcctaaatatcatatggaagatgtgcaccgcgccggtggcgtgatgggcattttaggcgagcttgaccgcgccggattgctgcataccgatgtgccacacgttgccgccgatgcaggcggaaatctcaagtcggtgcttgccaagtacgatgtcatgcaaacccaagatgacaacgtaaaacaattctttatggcgggacctgcgggcatccccaccactaaagcctttagtcaagactgccgctggccatcgctggatgatgacaggcgagaagggtgtatccgcagccgcgaatttgcctttagccaagaaggcgggctggccgtgctgtcgggcaatttagctgaaaatggctgtattgttaaaacggcgggcgtggatgagtcgaatttgatttttgttggctcggctcgcgtctacgaaagccaagatgatgcggtggcgggcattttaggtggcgaagtagtggcgggcgatgtggtcgtcatccgttacgaagggccaaaaggtggtccgggtatgcaagaaatgttgtaccccaccagttacttaaaatcccgcggcttaggcaaggcctgcgcgctaatcaccgatggacgtttctctggtggaacatccggtttatccatcggccatgtgtcgcccgaggcggcggctggcggcacgattgccttgattgaaaacggcgatcgcattgaaatcgatatcccagcgcgcagtattaagctcgctgtgagcgatgccgagttagcggggcgtcgtgagaccatgttagcgcgtggtccaatggcgtggaagcctgttggtcgcgagcgttttgtatctatggcactaaaagcctacgccatgcttgccaccagtgccgataagggcgcggtgcgcgatcgcagcaagttggaggactga

SEQ ID NO: 526 - protein, 619 aa, Shewanella oneidensis
MPKLRSATSTEGRNMAGARALWRATGVKDNDFGKPIIAIANSFTQFVPGHVHLKDMGSLVASAIEEAGGIAKEFNTIAVDDGIAMGHGGMLYSLPSRELIADSVEYMVNAHCADALVCISNCDKITPGMLMAALRLNIPVVFVSGGPMEAGKTKLSDKLIKLDLVDAMVAAADSSVSDEDSAKIERSACPTCGSCSGMFTANSMNCLTEALGLSLPGNGSMLATHSDRRELFLEAGRRVMALTKRYYEQDDTSALPRNIACFKAFENATALDIAMGGSSNTVLHLLAAAQEAEVAFTMDDIDRMSRLVPHLCKVAPSTPKYHMEDVHRAGGVMGILGELDRAGLLHTDVPHVAADAGGNLKSVLAKYDVMQTQDDNVKQFFMAGPAGIPTTKAFSQDCRWPSLDDDRREGCIRSREFAFSQEGGLAVLSGNLAENGCIVKTAGVDESNLIFVGSARVYESQDDAVAGILGGEVVAGDVVVIRYEGPKGGPGMQEMLYPTSYLKSRGLGKACALITDGRFSGGTSGLSIGHVSPEAAAGGTIALIENGDRIEIDIPARSIKLAVSDAELAGRRETMLARGPMAWKPVGRERFVSMALKAYAMLATSADKGAVRDRSKLED

SEQ ID NO: 527 - DNA, 1212 bp, Escherichia coli
atgaaattaccgatttatctcgactactccgcaaccacgccggtggacccgcgtgttgccgagaaaatgatgcagtttatgacgatggacggaacctttggtaacccggcctcccgttctcaccgtttcggctggcaggctgaagaagcggtagatatcgcccgtaatcagattgccgatctggtcggcgctgatccgcgtgaaatcgtctttacctctggtgcaaccgaatctgacaacctggcgatcaaaggtgcagccaacttttatcagaaaaaaggcaagcacatcatcaccagcaaaaccgaacacaaagcggtactggatacctgccgtcagctggagcgcgaaggttttgaagtcacctacctggcaccgcagcgtaacggcattatcgacctgaaagaacttgaagcagcgatgcgtgacgacaccatcctcgtgtccatcatgcacgtaaataacgaaatcggcgtggtgcaggatatcgcggctatcggcgaaatgtgccgtgctcgtggcattatctatcacgttgatgcaacccagagcgtgggtaaactgcctatcgacctgagccagttgaaagttgacctgatgtctttctccggtcacaaaatctatggcccgaaaggtatcggtgcgctgtatgtacgtcgtaaaccgcgcgtacgcatcgaagcgcaaatgcacggcggcggtcacgagcgcggtatgcgttccggcactctgcctgttcaccagatcgtcggaatgggcgaggcctatcgcatcgcaaaagaagagatggcgaccgagatggaacgtctgcgcggcctgcgtaaccgtctgtggaacggcatcaaagatatcgaagaagtttacctgaacggtgacctggaacacggtgcgccgaacattctcaacgtcagcttcaactacgttgaaggtgagtcgctgattatggcgctgaaagacctcgcagtttcttcaggttccgcctgtacgtcagcaagcctcgaaccgtcctacgtgctgcgcgcgctggggctgaacgacgagctggcacatagctctatccgtttctctttaggtcgttttactactgaagaagagatcgactacaccatcgagttagttcgtaaatccatcggtcgtctgcgtgacctttctccgctgtgggaaatgtacaagcagggcgtggatctgaacagcatcgaatgggctcatcat

SEQ ID NO: 528 - protein, 404 aa, Escherichia coli
MKLPIYLDYSATTPVDPRVAEKMMQFMTMDGTFGNPASRSHRFGWQAEEAVDIARNQIADLVGADPREIVFTSGATESDNLAIKGAANFYQKKGKHIITSKTEHKAVLDTCRQLEREGFEVTYLAPQRNGIIDLKELEAAMRDDTILVSIMHVNNEIGVVQDIAAIGEMCRARGIIYHVDATQSVGKLPIDLSQLKVDLMSFSGHKIYGPKGIGALYVRRKPRVRIEAQMHGGGHERGMRSGTLPVHQIVGMGEAYRIAKEEMATEMERLRGLRNRLWNGIKDIEEVYLNGDLEHGAPNILNVSFNYVEGESLIMALKDLAVSSGSACTSASLEPSYVLRALGLNDELAHSSIRFSLGRFTTEEEIDYTIELVRKSIGRLRDLSPLWEMYKQGVDLNSIEWAHH

SEQ ID NO: 529 - DNA, 384 bp, Escherichia coli
atggcttacagcgaaaaagttatcgaccattacgagaatccgcgtaacgtgggttcctttgacaacaacgacgagaacgtcggcagcggcatggtgggggcaccggcctgtggcgacgtgatgaagttgcagattaaagtcaacgatgaaggtatcattgaagacgcgcgttttaaaacttacggctgcggttccgctatcgcttccagctccctggtcaccgaatgggtgaaagggaagtctctcgacgaagcgcaggcgatcaaaaacaccgatattgctgaagaacttgaactgccgccggtgaaaattcactgttctattctggcagaagacgcgatcaaagccgccattgcggactataaaagcaaacgtgaagcaaaa

SEQ ID NO: 530 - protein, 128 aa, Escherichia coli
MAYSEKVIDHYENPRNVGSFDNNDENVGSGMVGAPACGDVMKLQIKVNDEGIIEDARFKTYGCGSAIASSSLVTEWVKGKSLDEAQAIKNTDIAEELELPPVKIHCSILAEDAIKAAIADYKSKREAK

SEQ ID NO: 531 - DNA, 321 bp, Escherichia coli
atgtcgattacactgagcgacagtgcagcagcgcgagtaaatacctttctggctaaccgcggtaaagggtttggcctgcgtctgggcgtgagaacctccgggtgttcaggtatggcttatgtactggaatttgttgacgaaccgacgccggaagacatcgtgtttgaagacaaaggcgtgaaagtcgtggtcgatggcaagagcctgcaatttctggacggtacgcagctggacttcgtaaaagaaggcctgaacgaagggtttaaattcaccaacccgaacgtcaaagatgagtgtggttgcggcgaaagcttccacgtt

SEQ ID NO: 532 - protein, 107 aa, Escherichia coli
MSITLSDSAAARVNTFLANRGKGFGLRLGVRTSGCSGMAYVLEFVDEPTPEDIVFEDKGVKVVVDGKSLQFLDGTQLDFVKEGLNEGFKFTNPNVKDECGCGESFHV

SEQ ID NO: 533 - DNA, 513 bp, Escherichia coli
atggattacttcaccctctttggcttgcctgcccgctatcaactcgatacccaggcgctgagcctgcgttttcaggatctacaacgtcagtatcatcctgataaattcgccagcggaagccaggcggaacaactcgccgccgtacagcaatctgcaaccattaaccaggcctggcaaacgctgcgtcatccgttaatgcgcgcggaatatttgctttctttgcacggctttgatctcgccagcgagcagcatactgtgcgcgacaccgcgttcctgatggaacagttggagctgcgcgaagagctggacgagatcgaacaggcgaaagatgaagcgcggctggaaagctttatcaaacgtgtgaaaaagatgtttgatacccgccatcagttgatggttgaacagttagacaacgagacgtgggacgcggcggcggataccgtgcgtaagctgcgttttctcgataaactgcgaagcagtgccgaacaactcgaagaaaaactgctcgatttt

SEQ ID NO: 534 - protein, 171 aa, Escherichia coli
MDYFTLFGLPARYQLDTQALSLRFQDLQRQYHPDKFASGSQAEQLAAVQQSATINQAWQTLRHPLMRAEYLLSLHGFDLASEQHTVRDTAFLMEQLELREELDEIEQAKDEARLESFIKRVKKMFDTRHQLMVEQLDNETWDAAADTVRKLRFLDKLRSSAEQLEEKLLDF

SEQ ID NO: 535 - DNA, 1848 bp, Escherichia coli
atggccttattacaaattagtgaacctggtttgagtgctgcgccgcatcagcgtcgtctggcggccggtattgacctgggcacaaccaactcgctggtggcgacagtgcgcagcggtcaggccgaaacgttagccgatcatgaaggccgtcacctgctgccatctgttgttcactatcaacagcaagggcattcggtgggttatgacgcgcgtactaatgcagcgctcgataccgccaacacaattagttctgttaaacgcctgatgggacgctcgctggctgatatccagcaacgctatccgcatctgccttatcaattccaggccagcgaaaacggcctgccgatgattgaaacggcggcggggctgctgaacccggtgcgcgtttctgcggacatcctcaaagcactggcggcgcgggcaactgaagccctggcaggcgagctggatggtgtagttatcaccgttccggcgtactttgacgatgcccagcgtcagggcaccaaagacgcggcgcgtctggcgggccttcacgtcctgcgcttacttaacgaaccgaccgctgcggctatcgcctacgggctggattccggtcaggaaggcgtgatcgccgtttatgacctcggtggcgggacgtttgatatttccattctgcgcttaagtcgcggcgtgtttgaagtgctggcaaccggcggtgattccgcgctcggcggcgatgatttcgaccatctgctggcggattacattcgcgagcaggcgggcattcctgatcgtagcgataaccgcgttcagcgtgaactgctggatgccgccattgcagccaaaatcgcgctgagcgatgcggactccgtgaccgttaacgttgcgggctggcagggcgaaatcagccgtgaacaattcaatgaactgatcgcgccactggtaaaacgaaccttactggcttgtcgtcgcgcgctgaaagacgcgggtgtagaagctgatgaagtgctggaagtggtgatggtgggcggttctactcgcgtgccgctggtgcgtgaacgggtaggcgaatttttcggtcgtccaccgctgacttccatcgacccggataaagtcgtcgctattggcgcggcgattcaggcggatattctggtgggtaacaagccagacagcgaaatgctgttgcttgatgtgatcccactgtcgctgggcctcgaaacgatgggcggcctggtggagaaagtgattccgcgtaataccactattccggtggcccgcgctcaggatttcaccacctttaaagatggtcagacggcgatgtctatccatgtaatgcagggtgagcgcgaactggtgcaggactgccgctcactggcgcgttttgcgctgcgtggtattccggcgctaccggctggcggtgcgcatattcgcgtgacgttccaggtcgatgccgacggtcttttgagcgtgacggcgatggagaaatccaccggcgttgaggcgtctattcaggtcaaaccgtcttacggtctgaccgatagcgaaatcgcttcgatgatcaaagactcaatgagctatgccgagcaggacgtaaaagcccgaatgctggcagaacaaaaagtagaagcggcgcgtgtgctggaaagtctgcacggcgcgctggctgctgatgccgcgctgttaagcgccgcagaacgtcaggtcattgacgatgctgccgctcacctgagtgaagtggcgcagggcgatgatgttgacgccatcgaacaagcgattaaaaacgtagacaaacaaacccaggatttcgccgctcgccgcatggaccagtcggttcgtcgtgcgctgaaaggccattccgtggacgaggtt

SEQ ID NO: 536 - protein, 616 aa, Escherichia coli
MALLQISEPGLSAAPHQRRLAAGIDLGTTNSLVATVRSGQAETLADHEGRHLLPSVVHYQQQGHSVGYDARTNAALDTANTISSVKRLMGRSLADIQQRYPHLPYQFQASENGLPMIETAAGLLNPVRVSADILKALAARATEALAGELDGVVITVPAYFDDAQRQGTKDAARLAGLHVLRLLNEPTAAAIAYGLDSGQEGVIAVYDLGGGTFDISILRLSRGVFEVLATGGDSALGGDDFDHLLADYIREQAGIPDRSDNRVQRELLDAAIAAKIALSDADSVTVNVAGWQGEISREQFNELIAPLVKRTLLACRRALKDAGVEADEVLEVVMVGGSTRVPLVRERVGEFFGRPPLTSIDPDKVVAIGAAIQADILVGNKPDSEMLLLDVIPLSLGLETMGGLVEKVIPRNTTIPVARAQDFTTFKDGQTAMSIHVMQGERELVQDCRSLARFALRGIPALPAGGAHIRVTFQVDADGLLSVTAMEKSTGVEASIQVKPSYGLTDSEIASMIKDSMSYAEQDVKARMLAEQKVEAARVLESLHGALAADAALLSAAERQVIDDAAAHLSEVAQGDDVDAIEQAIKNVDKQTQDFAARRMDQSVRRALKGHSVDEV

SEQ ID NO: 537 - DNA, 333 bp, Escherichia coli
atgccaaagattgttattttgcctcatcaggatctctgccctgatggcgctgttctggaagctaatagcggtgaaaccattctcgacgcagctctgcgtaacggtatcgagattgaacacgcctgtgaaaaatcctgtgcttgcaccacctgccactgcatcgttcgtgaaggttttgactcactgccggaaagctcagagcaggaagacgacatgctggacaaagcctggggactggagccggaaagccgtttaagctgccaggcgcgcgttaccgacgaagatttagtagtcgaaatcccgcgttacactatcaaccatgcgcgtgagcat

SEQ ID NO: 538 - protein, 111 aa, Escherichia coli
MPKIVILPHQDLCPDGAVLEANSGETILDAALRNGIEIEHACEKSCACTTCHCIVREGFDSLPESSEQEDDMLDKAWGLEPESRLSCQARVTDEDLVVEIPRYTINHAREH

SEQ ID NO: 539 - DNA, 198 bp, Escherichia coli
atgggacttaagtggaccgatagccgcgaaattggcgaagcactgtacgatgcgtatcccgatcttgatccgaaaacggttcgattcaccgatatgcatcagtggatttgcgatctggaagatttcgacgacgacccgcaggcatccaacgagaaaatcctcgaagcgattttgttagtctggctggacgaggccgaa

SEQ ID NO: 540 - protein, 66 aa, Escherichia coli
MGLKWTDSREIGEALYDAYPDLDPKTVRFTDMHQWICDLEDFDDDPQASNEKILEAILLVWLDEAE

SEQ ID NO: 541 - DNA, 1170 bp, Wolinella succinogenes
atgcaagagcctaagatgtcggtctatctcgacaacaatgccacgaccttggtcgatcccaaggttaaggagctgatggatccctacttctgtcagatgtatgggaatccaaactccctccaccgattcggaacagagacgcatcctgccattaaaaaggcacttgatgatctctatgagggaatcaacgccgccgatgaggatgatgtgatcatcacctcctgcgccaccgagagcaacaactgggtgatcaaaggagtctattttgatatcctgcgccatggcgtgaaaaaccacatcgtcactaccgatgtagagcatcccgctgtgcgcgccacctgcgcttttttggagacgcttggagtcgaggtgacctacctgcccatcaatgatcaaggcacgattagtgctgagcaagtgagagaggcgatcactgagaaaacggcgctagtgagtgtgatgtgggcgaataatgagacagggatgatcttccccatccaagagattggagagatatgcagagagagaggaatcctttttcacaccgatgcggtgcaagccataggcaagattcctgtggatgtgcaaaaggccaagatcgatctcctctctttctctgcccataagttccatggacctaagggcatgggagccctctatattcgcaaaggagttgagctcactccgctttttcatggaggcgagcacatgagcggaaggcgttctggcacgctcaatgttgcaggaatcgtgggcatgggcgaggcaatgaggctggcggtgcagtatcttgattttgaaaaaagcaatgttagacggctaagagataggctggagaatgcccttctggagcttcctgatgtctttgttgtgggctctagggagaatcgtgttcccaacacggtgctcatcagcgtcaaaggagtggagggcgaagcgatgctttgggacctcaataaggcaggaatcgccgcgagcactggaagcgcttgcgcgagtgaagacctagaggccaaccccgtgatgatcgctattggcgcggataaggagctggctcacacagcgattcgtctttcactctctcgattcaccacggaggctgaaatcgattacaccattgaagtgtttaaaaagtccgcagagaggctaagaagcatctctagcagctac

SEQ ID NO: 542 - protein, 390 aa, Wolinella succinogenes
MQEPKMSVYLDNNATTLVDPKVKELMDPYFCQMYGNPNSLHRFGTETHPAIKKALDDLYEGINAADEDDVIITSCATESNNWVIKGVYFDILRHGVKNHIVTTDVEHPAVRATCAFLETLGVEVTYLPINDQGTISAEQVREAITEKTALVSVMWANNETGMIFPIQEIGEICRERGILFHTDAVQAIGKIPVDVQKAKIDLLSFSAHKFHGPKGMGALYIRKGVELTPLFHGGEHMSGRRSGTLNVAGIVGMGEAMRLAVQYLDFEKSNVRRLRDRLENALLELPDVFVVGSRENRVPNTVLISVKGVEGEAMLWDLNKAGIAASTGSACASEDLEANPVMIAIGADKELAHTAIRLSLSRFTTEAEIDYTIEVFKKSAERLRSISSSY

SEQ ID NO: 543 - DNA, 981 bp, Wolinella succinogenes
atggcaaaaaatgatcttttgggcggcgcactttgggatgcctactccaataaagtggccgcgcgcatggacaatcccaaatatctaggaaccctctctcaagaggatgcagacgctaaaggagccaagctcatcatcgctgattatggcgccgaatcgtgcggggatgcggtgcgactctattggcttatcgatcctaaaaccgatcgaatcatcgatgctaaattcaagagttttggctgtgggacagcgattgcgagctcagatatgatggtggagctctgccttggcaagacggttgatgaagcgatcaagatcaccaacattgatgtcgaaaaagccctccgtgatgaccctgaaacacccgccgtgcctggacaaaaaatgcactgttcggtgatggcttatgatgtgatcaaaaaggccgcttccctttacaagggtgtggatatggcgagctttgaggatgagattatcgtctgtgagtgtgctagagtgagccttggaaccctcaaagaggtgattagaatcaacgaccttaaaaccgtcgaagaggtgacggcctacaccaaagcaggagccttctgcaaaagctgtgtgaaacctggaggccacgaagagcgcgaatactatttggtcgatattttggcgcaaactcgtgctgagatggatgatgagaagctcaaaactcaagcggacaagagtgccagcggagagcttggctttaatgagatgagcatggtgcaaaaggtcaaggcggtcgacaaagtgatcgatgacaatatccgaccgatgctcatgatggacgggggtaatatggaggtgattgatattcgaagctctagcgatgggcataccgacatctacatccgctatgtaggggcttgcgcaggatgcgcaagtagctccacgggtactctttttgccattgaatcggtgctccagcaaaagcttgatagctccattcgcgtcttccctgtt

SEQ ID NO: 544 - protein, 327 aa, Wolinella succinogenes
MAKNDLLGGALWDAYSNKVAARMDNPKYLGTLSQEDADAKGAKLIIADYGAESCGDAVRLYWLIDPKTDRIIDAKFKSFGCGTAIASSDMMVELCLGKTVDEAIKITNIDVEKALRDDPETPAVPGQKMHCSVMAYDVIKKAASLYKGVDMASFEDEIIVCECARVSLGTLKEVIRINDLKTVEEVTAYTKAGAFCKSCVKPGGHEEREYYLVDILAQTRAEMDDEKLKTQADKSASGELGFNEMSMVQKVKAVDKVIDDNIRPMLMMDGGNMEVIDIRSSSDGHTDIYIRYVGACAGCASSSTGTLFAIESVLQQKLDSSIRVFPV

SEQ ID NO: 545 - DNA, 1485 bp, Vibrio cholerae
atggcgaattatttcaatacgctgaatctgcgtgaacagttggatcaacttggtcgttgccgttttatggcgcgagaagagtttgcaaccgaagctgattacctaaaaggtaagaaagtggtgatcgtaggttgtggggctcaaggcctaaaccaaggcctcaatatgcgtgattcaggtttggatgtttcttacgctctgcgtcaggctgcgattgatgaacagcgtcagtcatttaagaatgccaagaataatggcttcaacgtgggtagttatgaacaactcatcccaaccgcagatttggtgattaacttgacgccagacaagcagcacaccagtgtggtcaatgcggtgatgcctctgatgaagcaaggtgctgccttgggttactcacacggttttaatatcgttgaagagggcatgcagatccgtaaagacatcacggttgtgatggtggcaccaaaatgtccgggtacggaagttcgtgaagagtataagcgcggtttcggcgttcctactcttatcgcggtacaccctgaaaacgatccacaaggtgaaggttgggaaattgctaaagcgtgggctgcggcaacgggtggccatcgtgcgggctgtttagcttcttcttttgtggcggaagtgaaatccgatttgatgggtgagcaaaccattctctgcggtatgctgcaagcgggctctatcgtttgttacgagaaaatggttgctgatggcatcgaccctggttatgcgggcaagcttttgcaatttggttgggaaaccattaccgaagcactcaagtttggcggtattactcatatgatggatcgcctgtctaaccctgcaaaaatcaaagcgtttgagctgtctgaagagttgaaagatctgatgcgcccactgtacaacaagcatatggatgacatcatttctggccacttctctagcaccatgatggcggattgggcgaatgatgataaagacttattcggctggcgtgcagaaaccgctgagacgacctttgaaaactatccaacaaccgacgtaaaaattgctgagcaagaatactttgataacggtattttgatgattgccatggtgcgtgctggggttgagttggcgtttgaagcgatgacggcttcaggcatcatcgatgagtcggcttactatgaatcactgcacgaactcccactgattgccaatacggtagcgcgtaagcgtctgtatgaaatgaacgtggtaatctctgacactgctgagtacggtaactatctgtttgccaatgtggcggtaccactattgcgtgaaaagtttatgccgaaagtgggcactgatgtgattggtaaaggattaggcgtggtctctaatcaagttgataacgcaacgcttatcgaagtaaacagcatcatccgtaaccatccggttgagtatatcggtgaagagctacgcggttacatgaaagacatgaagcgcatcgccgtgggtgattaa

SEQ ID NO: 546 - protein, 494 aa, Vibrio cholerae
MANYFNTLNLREQLDQLGRCRFMAREEFATEADYLKGKKVVIVGCGAQGLNQGLNMRDSGLDVSYALRQAAIDEQRQSFKNAKNNGFNVGSYEQLIPTADLVINLTPDKQHTSVVNAVMPLMKQGAALGYSHGFNIVEEGMQIRKDITVVMVAPKCPGTEVREEYKRGFGVPTLIAVHPENDPQGEGWEIAKAWAAATGGHRAGCLASSFVAEVKSDLMGEQTILCGMLQAGSIVCYEKMVADGIDPGYAGKLLQFGWETITEALKFGGITHMMDRLSNPAKIKAFELSEELKDLMRPLYNKHMDDIISGHFSSTMMADWANDDKDLFGWRAETAETTFENYPTTDVKIAEQEYFDNGILMIAMVRAGVELAFEAMTASGIIDESAYYESLHELPLIANTVARKRLYEMNVVISDTAEYGNYLFANVAVPLLREKFMPKVGTDVIGKGLGVVSNQVDNATLIEVNSIIRNHPVEYIGEELRGYMKDMKRIAVGD

SEQ ID NO: 547 - DNA, 1014 bp, Pseudomonas  fluorescens
atgaaagttttctacgataaagactgcgacctgtcgatcatccaaggtaagaaagttgccatcatcggctacggttcccagggccacgctcaagcatgcaacctgaaggattccggcgtagacgtgactgttggcctgcgtaaaggctcggctaccgttgccaaggctgaagcccacggcttgaaagtgaccgacgttgctgcagccgttgccggtgccgacttggtcatgatcctgaccccggacgagttccagtcccagctgtacaagaacgaaatcgagccgaacatcaagaagggcgccactctggccttctcccacggcttcgcgatccactacaaccaggttgtgcctcgtgccgacctcgacgtgatcatgatcgcgccgaaggctccaggccacaccgtacgttccgagttcgtcaagggcggtggtattcctgacctgatcgcgatctaccaggacgcttccggcaacgccaagaacgttgccctgtcctacgccgcaggcgtgggcggcggccgtaccggcatcatcgaaaccaccttcaaggacgagactgaaaccgacctgttcggtgagcaggctgttctgtgtggcggtaccgtcgagctggtcaaagccggtttcgaaaccctggttgaagctggctacgctccagaaatggcctacttcgagtgcctgcacgaactgaagctgatcgttgacctcatgtacgaaggcggtatcgccaacatgaactactcgatctccaacaacgctgaatacggcgagtacgtgactggtccagaagtcatcaacgccgaatcccgtcaggccatgcgcaatgctctgaagcgcatccaggacggcgaatacgcgaagatgttcatcagcgaaggcgctaccggctacccatcgatgaccgccaagcgtcgtaacaacgctgctcacggtatcgaaatcatcggcgagcaactgcgctcgatgatgccttggatcggtgccaacaaaatcgtcgacaaagccaagaac

SEQ ID NO: 548 - protein, 338 aa, Pseudomonas  fluorescens
MKVFYDKDCDLSIIQGKKVAIIGYGSQGHAQACNLKDSGVDVTVGLRKGSATVAKAEAHGLKVTDVAAAVAGADLVMILTPDEFQSQLYKNEIEPNIKKGATLAFSHGFAIHYNQVVPRADLDVIMIAPKAPGHTVRSEFVKGGGIPDLIAIYQDASGNAKNVALSYAAGVGGGRTGIIETTFKDETETDLFGEQAVLCGGTVELVKAGFETLVEAGYAPEMAYFECLHELKLIVDLMYEGGIANMNYSISNNAEYGEYVTGPEVINAESRQAMRNALKRIQDGEYAKMFISEGATGYPSMTAKRRNNAAHGIEIIGEQLRSMMPWIGANKIVDKAKN

SEQ ID NO: 549 - DNA, 1047 bp, Achromobacter xylosoxidans
atgaaagctctggtttatcacggtgaccacaagatctcgcttgaagacaagcccaagcccacccttcaaaagcccacggatgtagtagtacgggttttgaagaccacgatctgcggcacggatctcggcatctacaaaggcaagaatccagaggtcgccgacgggcgcatcctgggccatgaaggggtaggcgtcatcgaggaagtgggcgagagtgtcacgcagttcaagaaaggcgacaaggtcctgatttcctgcgtcacttcttgcggctcgtgcgactactgcaagaagcagctttactcccattgccgcgacggcgggtggatcctgggttacatgatcgatggcgtgcaggccgaatacgtccgcatcccgcatgccgacaacagcctctacaagatcccccagacaattgacgacgaaatcgccgtcctgctgagcgacatcctgcccaccggccacgaaatcggcgtccagtatgggaatgtccagccgggcgatgcggtggctattgtcggcgcgggccccgtcggcatgtccgtactgttgaccgcccagttctactccccctcgaccatcatcgtgatcgacatggacgagaatcgcctccagctcgccaaggagctcggggcaacgcacaccatcaactccggcacggagaacgttgtcgaagccgtgcataggattgcggcagagggagtcgatgttgcgatcgaggcggtgggcataccggcgacttgggacatctgccaggagatcgtcaagcccggcgcgcacatcgccaacgtcggcgtgcatggcgtcaaggttgacttcgagattcagaagctctggatcaagaacctgacgatcaccacgggactggtgaacacgaacacgacgcccatgctgatgaaggtcgcctcgaccgacaagcttccgttgaagaagatgattacccatcgcttcgagctggccgagatcgagcacgcctatcaggtattcctcaatggcgccaaggagaaggcgatgaagatcatcctctcgaacgcaggcgctgcctga

SEQ ID NO: 550 - protein, 348 aa, Achromobacter xylosoxidans
MKALVYHGDHKISLEDKPKPTLQKPTDVVVRVLKTTICGTDLGIYKGKNPEVADGRILGHEGVGVIEEVGESVTQFKKGDKVLISCVTSCGSCDYCKKQLYSHCRDGGWILGYMIDGVQAEYVRIPHADNSLYKIPQTIDDEIAVLLSDILPTGHEIGVQYGNVQPGDAVAIVGAGPVGMSVLLTAQFYSPSTIIVIDMDENRLQLAKELGATHTINSGTENVVEAVHRIAAEGVDVAIEAVGIPATWDICQEIVKPGAHIANVGVHGVKVDFEIQKLWIKNLTITTGLVNTNTTPMLMKVASTDKLPLKKMITHRFELAEIEHAYQVFLNGAKEKAMKIILSNAGAA

SEQ ID NO: 551 - DNA, 1014 bp, Pseudomonas  aeruginosa
atgcgcgttttctacgataaagactgtgacctctcgatcatccagggcaagaaagttgccatcatcggctacggctcccagggccacgcccatgcctgcaacctgaaggactccggcgtcgacgtcaccgtgggcctgcgtagcggctccgccaccgtggccaaggccgaagcgcacggtctgaaggttgccgacgtgaagaccgccgtcgccgcagccgacgtggtcatgatcctcaccccggacgagttccagggccgcctgtacaaggaagagatcgagccgaacctgaagaagggcgccaccctggccttcgctcacggcttctccatccactacaaccaggtcgtcccgcgcgccgacctcgacgtgatcatgatcgcgccgaaggcaccgggtcacaccgtgcgttccgagttcgtcaagggcggtggcatccctgacctgatcgccatctaccaggacgcttccggcaacgccaagaacgtcgccctgtcctacgcctgcggcgtcggcggcggtcgtaccggtatcatcgaaaccaccttcaaggacgagaccgaaaccgacctgttcggtgagcaggccgttctctgcggtggttgcgtcgagctggtcaaggccggtttcgaaaccctggtcgaagccggttacgcgccggaaatggcctacttcgagtgcctgcacgagctgaagctgatcgtcgacctgatgtacgaaggcggcatcgccaacatgaactactccatctccaacaatgccgaatacggtgagtacgtaaccggtccggaggtgatcaacgccgagtcccgtgctgccatgcgcaacgccctgaagcgcatccaggacggcgagtacgcgaaaatgttcattaccgaaggtgcggccaactacccgtcgatgactgcctaccgccgcaacaacgccgctcacccgatcgagcagatcggcgagaagctgcgcgcgatgatgccgtggatcgcagccaacaagatcgtcgacaagagcaagaac

SEQ ID NO: 552 - protein, 338 aa, Pseudomonas  aeruginosa
MRVFYDKDCDLSIIQGKKVAIIGYGSQGHAHACNLKDSGVDVTVGLRSGSATVAKAEAHGLKVADVKTAVAAADVVMILTPDEFQGRLYKEEIEPNLKKGATLAFAHGFSIHYNQVVPRADLDVIMIAPKAPGHTVRSEFVKGGGIPDLIAIYQDASGNAKNVALSYACGVGGGRTGIIETTFKDETETDLFGEQAVLCGGCVELVKAGFETLVEAGYAPEMAYFECLHELKLIVDLMYEGGIANMNYSISNNAEYGEYVTGPEVINAESRAAMRNALKRIQDGEYAKMFITEGAANYPSMTAYRRNNAAHPIEQIGEKLRAMMPWIAANKIVDKSKN

SEQ ID NO: 553 - DNA, 5323 bp, artificial sequence
  vector
gaattcagatctctcgagcccgggatcgatggtacctcgcgaaagcttggatgttgtacaggataatgtccagaaggtcgatagaaagcgtgagaaacagcgtacagacgatttagagatgtagaggtacttttatgccgagaaaactttttgcgtgtgacagtccttaaaatatacttagagcgtaagcgaaagtagtagcgacagctattaactttcggttgcaaagctctaggatttttaatggacgcagcgcatcacacgcaaaaaggaaattggaataaatgcgaaatttgagatgttaattaaagacctttttgaggtctttttttcttagatttttggggttatttaggggagaaaacataggggggtactacgacctcccccctaggtgtccattgtccattgtccaaacaaataaataaatattgggtttttaatgttaaaaggttgttttttatgttaaagtgaaaaaaacagatgttgggaggtacagtgatagttgtagatagaaaagaagagaaaaaagttgctgttactttaagacttacaacagaagaaaatgagatattaaatagaatcaaagaaaaatataatattagcaaatcagatgcaaccggtattctaataaaaaaatatgcaaaggaggaatacggtgcattttaaacaaaaaaagatagacagcactggcatgctgcctatctatgactaaattttgttaagtgtattagcaccgttattatatcatgagcgaaaatgtaataaaagaaactgaaaacaagaaaaattcaagaggacgtaattggacatttgttttatatccagaatcagcaaaagccgagtggttagagtatttaaaagagttacacattcaatttgtagtgtctccattacatgatagggatactgatacagaaggtaggatgaaaaaagagcattatcatattctagtgatgtatgagggtaataaatcttatgaacagataaaaataattaacagaagaattgaatgcgactattccgcagattgcaggaagtgtgaaaggtcttgtgagatatatgcttcacatggacgatcctaataaatttaaatatcaaaaagaagatatgatagtttatggcggtgtagatgttgatgaattattaaagaaaacaacaacagatagatataaattaattaaagaaatgattgagtttattgatgaacaaggaatcgtagaatttaagagtttaatggattatgcaatgaagtttaaatttgatgattggttcccgcttttatgtgataactcggcgtatgttattcaagaatatataaaatcaaatcggtataaatctgaccgatagattttgaatttaggtgtcacaagacactcttttttcgcaccagcgaaaactggtttaagccgactgcgcaaaagacataatcgattcacaaaaaataggcacacgaaaaacaagttaagggatgcagtttatgcatcccttaacttacttattaaataatttatagctattgaaaagagataagaattgttcaaagctaatattgtttaaatcgtcaattcctgcatgttttaaggaattgttaaattgattttttgtaaatattttcttgtattctttgttaacccatttcataacgaaataattatacttttgtttatctttgtgtgatattcttgatttttttctacttaatctgataagtgagctattcactttaggtttaggatgaaaatattctcttggaaccatacttaatatagaaatatcaacttctgccattaaaagtaatgccaatgagcgttttgtatttaataatcttttagcaaacccgtattccacgattaaataaatctcattagctatactatcaaaaacaattttgcgtattatatccgtacttatgttataaggtatattaccatatattttataggattggtttttaggaaatttaaactgcaatatatccttgtttaaaacttggaaattatcgtgatcaacaagtttattttctgtagttttgcataatttatggtctatttcaatggcagttacgaaattacacctctttactaattcaagggtaaaatggccttttcctgagccgatttcaaagatattatcatgttcatttaatcttatatttgtcattattttatctatattatgttttgaagtaataaagttttgactgtgttttatatttttctcgttcattataaccctctttaatttggttatatgaattttgcttattaacgattcattataaccacttattttttgtttggttgataatgaactgtgctgattacaaaaatactaaaaatgcccatattttttcctccttataaaattagtataattatagcacgagctctgataaatatgaacatgatgagtgatcgttaaatttatactgcaatcggatgcgattattgaataaaagatatgagagatttatctaatttcttttttcttgtaaaaaaagaaagttcttaaaggttttatagttttggtcgtagagcacacggtttaacgacttaattacgaagtaaataagtctagtgtgttagactttatgaaatctatatacgtttatatatatttattatccggatctgcatcgcaggatgctgctggctaccctgtggaacacctacatctgtattaacgaagcgctggcattgaccctgagtgatttttctctggtcccgccgcatccataccgccagttgtttaccctcacaacgttccagtaaccgggcatgttcatcatcagtaacccgtatcgtgagcatcctctctcgtttcatcggtatcattacccccatgaacagaaattcccccttacacggaggcatcaagtgaccaaacaggaaaaaaccgcccttaacatggcccgctttatcagaagccagacattaacgcttctggagaaactcaacgagctggacgcggatgaacaggcagacatctgtgaatcgcttcacgaccacgctgatgagctttaccgcagctgcctcgcgcgtttcggtgatgacggtgaaaacctctgacacatgcagctcccggagacggtcacagcttgtctgtaagcggatgccgggagcagacaagcccgtcagggcgcgtcagcgggtgttggcgggtgtcggggcgcagccatgacccagtcacgtagcgatagcggagtgtatactggcttaactatgcggcatcagagcagattgtactgagagtgcaccatatgcggtgtgaaataccgcacagatgcgtaaggagaaaataccgcatcaggcgctcttccgcttcctcgctcactgactcgctgcgctcggtcgttcggctgcggcgagcggtatcagctcactcaaaggcggtaatacggttatccacagaatcaggggataacgcaggaaagaacatgtgagcaaaaggccagcaaaaggccaggaaccgtaaaaaggccgcgttgctggcgtttttccataggctccgcccccctgacgagcatcacaaaaatcgacgctcaagtcagaggtggcgaaacccgacaggactataaagataccaggcgtttccccctggaagctccctcgtgcgctctcctgttccgaccctgccgcttaccggatacctgtccgcctttctcccttcgggaagcgtggcgctttctcaatgctcacgctgtaggtatctcagttcggtgtaggtcgttcgctccaagctgggctgtgtgcacgaaccccccgttcagcccgaccgctgcgccttatccggtaactatcgtcttgagtccaacccggtaagacacgacttatcgccactggcagcagccactggtaacaggattagcagagcgaggtatgtaggcggtgctacagagttcttgaagtggtggcctaactacggctacactagaaggacagtatttggtatctgcgctctgctgaagccagttaccttcggaaaaagagttggtagctcttgatccggcaaacaaaccaccgctggtagcggtggtttttttgtttgcaagcagcagattacgcgcagaaaaaaaggatctcaagaagatcctttgatcttttctacggggtctgacgctcagtggaacgaaaactcacgttaagggattttggtcatgagattatcaaaaaggatcttcacctagatccttttaaattaaaaatgaagttttaaatcaatctaaagtatatatgagtaaacttggtctgacagttaccaatgcttaatcagtgaggcacctatctcagcgatctgtctatttcgttcatccatagttgcctgactccccgtcgtgtagataactacgatacgggagggcttaccatctggccccagtgctgcaatgataccgcgagacccacgctcaccggctccagatttatcagcaataaaccagccagccggaagggccgagcgcagaagtggtcctgcaactttatccgcctccatccagtctattaattgttgccgggaagctagagtaagtagttcgccagttaatagtttgcgcaacgttgttgccattgctgcaggcatcgtggtgtcacgctcgtcgtttggtatggcttcattcagctccggttcccaacgatcaaggcgagttacatgatcccccatgttgtgcaaaaaagcggttagctccttcggtcctccgatcgttgtcagaagtaagttggccgcagtgttatcactcatggttatggcagcactgcataattctcttactgtcatgccatccgtaagatgcttttctgtgactggtgagtactcaaccaagtcattctgagaatagtgtatgcggcgaccgagttgctcttgcccggcgtcaacacgggataataccgcgccacatagcagaactttaaaagtgctcatcattggaaaacgttcttcggggcgaaaactctcaaggatcttaccgctgttgagatccagttcgatgtaacccactcgtgcacccaactgatcttcagcatcttttactttcaccagcgtttctgggtgagcaaaaacaggaaggcaaaatgccgcaaaaaagggaataagggcgacacggaaatgttgaatactcatactcttcctttttcaatattattgaagcatttatcagggttattgtctcatgagcggatacatatttgaatgtatttagaaaaataaacaaataggggttccgcgcacatttccccgaaaagtgccacctgacgtctaagaaaccattattatcatgacattaacctataaaaataggcgtatcacgaggccctttcgtcttcaa

SEQ ID NO: 554 - DNA, 37 bp, artificial sequence
  primer
tatagaattcttgctcaatcatgaaaggatagttgag

SEQ ID NO: 555 - DNA, 39 bp, artificial sequence
  primer
tatactcgagagataaattgacgccttttaaaatctcac

SEQ ID NO: 556 - DNA, 38 bp, artificial sequence
  primer
atatcccgggtctcacgaaactcgacttgaaggacatg

SEQ ID NO: 557 - DNA, 35 bp, artificial sequence
  primer
tataggtaccccccttactacccgattgaaccttc

SEQ ID NO: 558 - DNA, 22 bp, artificial sequence
  primer
ctgtttctcacgctttctatcg

SEQ ID NO: 559 - DNA, 21 bp, artificial sequence
  primer
ttggaaaacgttcttcggggc

SEQ ID NO: 560 - DNA, 23 bp, artificial sequence
  primer
ttggcttattttgattaataaat

SEQ ID NO: 561 - DNA, 24 bp, artificial sequence
  primer
ttataatggctaacattcatcaac

SEQ ID NO: 562 - DNA, 22 bp, artificial sequence
  primer
ttgtctcgaggaccgagcgcag

SEQ ID NO: 563 - DNA, 60 bp, artificial sequence
  primer
tatagacaagcccgtcctgcagttaagcttttggatcctgttatccgctcacaattccac

SEQ ID NO: 564 - DNA, 52 bp, artificial sequence
  primer
atatggatccatataggaggaatttttgtaatggaattcaaatataacggaa

SEQ ID NO: 565 - DNA, 31 bp, artificial sequence
  primer
atatctgcagctataaatctgtaacgcaacc

SEQ ID NO: 566 - DNA, 20 bp, artificial sequence
  primer
gcgtttcggtgatgacggtg

SEQ ID NO: 567 - DNA, 51 bp, artificial sequence
  primer
tagaattcgtgacgggcttgtcgtcgaccttaagtaagtcgtattggcacc

SEQ ID NO: 568 - DNA, 95 bp, artificial sequence
  primer
acttgtaggagacgggcttgtcgtttaaacgagctccctaggttaattaaggcgccgcggccgcgcttgacaaaataagtcatcctctcgtagtg

SEQ ID NO: 569 - DNA, 64 bp, artificial sequence
  primer
atatgcggccgcatatataggaggaatttttgtaatggcaaccttggaagttaaagatttacac

SEQ ID NO: 570 - DNA, 34 bp, artificial sequence
  primer
atatttaattaactacccgattgaaccttccatc

SEQ ID NO: 571 - DNA, 3748 bp, artificial sequence
  vector
gacgaaagggccttataacttacaaataacccctcgaaaacattgaaagaataacccccaagatctatattatagatcttgggggttatttgttttaatattaaagaaatgacttcttctatttgtcatcaatactaaacaataatttgtacaaagtgattatttcttctagttcttcacgcgatacatgatcgacaatagtttcatcagtgacatgtcttgcccgtaaatctaaggctatggtttgatctaataatacttttccatatactgtttgactactagttagtcgatgatacattggaaaattacgcttggtactgctaattggagccacaatcgtcatgttacttgtctgacagactagatcattgcttagcgcaatggctggtcgcttattcatctgttcatgaccacggcttggattaaagttaacataaaatatatcaccttggcttaccattgaagttcattaccttctgactttccccaatcaagctcgtgatcccttttcccgtcatctttccaatccttaaatagttcgtgaatattggttgggttcttttttattggtgttaaaacaattgatccattttcaatggttattgtcatatcttggttatcatctaatttcagttgtttaataatttggctaggaattctagcagctttcgagtttccccactttgctaagcgtgtttgttctttaataagttccatattttcccctcctaaattattattacaagtcaagtatatcccatgtagatacacaatgcaaatattcttactggagaaataacaccttaagtctagcaccacccgcacgcatagcggtgcttaaaccatcaagggtcaagcccttaggctctctcaaacagttatcctaatcgtgaataactgcgcttcttttgcagtataaagagagaactctttatcagacaatttaagctcaaccagcccttgcactaactattattagagttggttttagcagcaacccgaataatctgcgttaatagttagcctgtccgtatcatttcctagtcttccagccacgtctttagtcgcgttgatctcgacaaggtttagcatacctatgttgttaactgcaagcggggtcacgaacgacactcacgggaggttttactagctaagaacaggtttccagcctttagttgctttgatggttgctaaccattgaataacaaaaaaacggttgctatcaggtttctgttaagattcccgataacaaccgtttactttaagtatcaatggttgaaaaacttagcctacatgttataatagtaccaagttagatagcttgtattggtagtacttgctatcgaaaatcttatcaggttgtgctgataagtcgtgaatcctaactctgctaagttgagggttcttttttttgcgttcatttattaagttgagtacattataaccgtaatataagattaatacaacctttatcattttaacgtctcaaccagccgaataatccttaaaaaaggattgattctaatgaagaaagcagacaagtaagcctcctaaattcactttagataaaaatttaggaggcatatcaaatgaactttaataaaattgatttagacaattggaagagaaaagagatatttaatcattatttgaaccaacaaacgacttttagtataaccacagaaattgatattagtgttttataccgaaacataaaacaagaaggatataaattttaccctgcatttattttcttagtgacaagggtgataaactcaaatacagcttttagaactggttacaatagcgacggagagttaggttattgggataagttagagccactttatacaatttttgatggtgtatctaaaacattctctggtatttggactcctgtaaagaatgacttcaaagagttttatgatttatacctttctgatgtagagaaatataatggttcggggaaattgtttcccaaaacacctatacctgaaaatgctttttctctttctattattccatggacttcatttactgggtttaacttaaatatcaataataatagtaattaccttctacccattattacagcaggaaaattcattaataaaggtaattcaatatatttaccgctatctttacaggtacatcattctgtttgtgatggttatcatgcaggattgtttatgaactctattcaggaattgtcagataggcctaatgactggcttttataagggcccgcgctagcggagtgtatactggcttactatgttggcactgatgagggtgtcagtgaagtgcttcatgtggcaggagaaaaaaggctgcaccggtgcgtcagcagaatatgtgatacaggatatattccgcttcctcgctcactgactcgctacgctcggtcgttcgactgcggcgagcggaaatggcttacgaacggggcggagatttcctggaagatgccaggaagatacttaacagggaagtgagagggccgcggcaaagccgtttttccataggctccgcccccctgacaagcatcacgaaatctgacgctcaaatcagtggtggcgaaacccgacaggactataaagataccaggcgtttccccctggcggctccctcgtgcgctctcctgttcctgcctttcggtttaccggtgtcattccgctgttatggccgcgtttgtctcattccacgcctgacactcagttccgggtaggcagttcgctccaagctggactgtatgcacgaaccccccgttcagtccgaccgctgcgccttatccggtaactatcgtcttgagtccaacccggaaagacatgcaaaagcaccactggcagcagccactggtaattgatttagaggagttagtcttgaagtcatgcgccggttaaggctaaactgaaaggacaagttttggtgactgcgctcctccaagccagttacctcggttcaaagagttggtagctcagagaaccttcgaaaaaccgccctgcaaggcggttttttcgttttcagagcaagagattacgcgcagaccaaaacgatctcaagaagatcatcttattaatcagataaaatatttctagatttcagtgcaatttatctcttcaaatgtagcacctgaagtcagccccatacgatataagttgtctcgaggaccgagcgcagcgagtcagtgagcgaggaagcggaagagcgagggcggagttgttgacagccgaggtaccatgtggtataatcccgagtgtggaattgtgagcggataacaatttcacacaggaaacagctatgaccatgattacgccaagcttggctgcaggtcgacggatccccgggaattcactggccgtcgttttacaacgtcgtgactgggaaaaccctggcgttacccaacttaatcgccttgcagcacatccccctttcgccagctggcgtaatagcgaagaggcccgcaccgatcgcccttcccaacagttgcgcagcctgaatggcgaatggcgcctgatgcggtattttctccttacgcatctgtgcggtatttcacaccgcatatggtgcactctcagtacaatctgctctgatgccgcatagttaagccagccccgacacccgccaacacccgctgacgcgccctgacgggcttgtctgctcccggcatccgcttacagacaagctgtgaccgtctccgggagctgcatgtgtcagaggttttcaccgtcatcaccgaaacgcgcga

SEQ ID NO: 572 - DNA, 54 bp, artificial sequence
  primer
ttagagtatcagcggccgcgacaattcaaaggagcgaaaaaatggctacacttg

SEQ ID NO: 573 - DNA, 47 bp, artificial sequence
  primer
catgtaacactagttacccaatagaaccctccattgaataagaaatc

SEQ ID NO: 574 - DNA, 7451 bp, artificial sequence
  vector
gaattcagatctctcgaccgatcagatcttgatcccctgcgccatcagatccttggcggcaagaaagccatccagtttactttgcagggcttcccaaccttcccagagggcgccccagctggcaattccggttcgcttgctgtccataaaaccgcccagtctagctatcgccatgtaagcccactgcaagctacctgctttctctttgcgcttgcgttttcccttgtccagatagcccagtagctgacattcatccggggtcagcaccgtttctgcggactggctttctacgtgttccgcttcctttagcagcccttgcgccctgagtgcttgcggcagcgtgaagctttctctgagctgtaacagcctgaccgcaacaaacgagaggatcgagaccatccgctccagattatccggctcctccatgcgttgcctctcggctcctgctccggttttccatgccttatggaactcctcgatccgccagcgatgggtataaatgtcgatgacgcgcaaggcttgggctagcgactcgaccggttcgctggtcagcaacaaccatttcaacggggtctcacccttgggcgggttaatctcctcggccagcaccgcgttgagcgtgatattcccctgttttagcgtgatgcgcccactgcgcaggctcaagctcgccttgcgggctggtcgatttttacgtttaccgcgtttatccaccacgcccttttgcggaatgctgatctgatagccacccaactccggttggttcttcagatggtcgtacagatacaacccagactctacgtccttgcgtgggtgcttggagcgcaccacgaagcgctcgttatgcgccagtttgtcctgcagataagcatgaatatcggcttcgcggtcacagaccgcaatcacgttgctcatcatgctgcccatgcgtaaccggctagttgcggcggctgccagccatttgccactctccttttcatccgcatcggcagggtcatccgggcgcatccaccactcctgatgcagtaatcctacggtgcggaatgtggtggcctcgagcaagagaacggagtgaacccaccatccgcgggatttatcctgaatagagcccagcttgccaagctcttcggcgacctggtggcgataactcaaagaggtggtgtcctcaatggccagcagttcgggaaactcctgagccaacttgactgtttgcatggcgccagcctttctgatcgcctcggcagaaacgttgggattgcggataaatcggtaagcgccttcctgcatggcttcactaccctctgatgagatggttattgatttaccagaatattttgccaattgggcggcgacgttaaccaagcgggcagtacggcgaggatcacccagcgccgccgaagagaacacagatttagcccagtcggccgcacgatgaagagcagaagttatcatgaacgttaccataataaatccccctttttgaaaataatgaagacttatattgttataataaaccagcaatctcgcattctgcaatataaaactagactccgcggctgaattgatagaattgtcccatgcgggctgtcggcgggcggtgtcaggggataagccgagagacacgtgttggattagacatgagtcgaatgacgcgattttttctggaaaaaatgacaaatgaagacgggaaaaatgataggggaaaatgttagatcggtacctcgcgaaagcttggatgttgtacaggataatgtccagaaggtcgatagaaagcgtgagaaacagcgtacagacgatttagagatgtagaggtacttttatgccgagaaaactttttgcgtgtgacagtccttaaaatatacttagagcgtaagcgaaagtagtagcgacagctattaactttcggttgcaaagctctaggatttttaatggacgcagcgcatcacacgcaaaaaggaaattggaataaatgcgaaatttgagatgttaattaaagacctttttgaggtctttttttcttagatttttggggttatttaggggagaaaacataggggggtactacgacctcccccctaggtgtccattgtccattgtccaaacaaataaataaatattgggtttttaatgttaaaaggttgttttttatgttaaagtgaaaaaaacagatgttgggaggtacagtgatagttgtagatagaaaagaagagaaaaaagttgctgttactttaagacttacaacagaagaaaatgagatattaaatagaatcaaagaaaaatataatattagcaaatcagatgcaaccggtattctaataaaaaaatatgcaaaggaggaatacggtgcattttaaacaaaaaaagatagacagcactggcatgctgcctatctatgactaaattttgttaagtgtattagcaccgttattatatcatgagcgaaaatgtaataaaagaaactgaaaacaagaaaaattcaagaggacgtaattggacatttgttttatatccagaatcagcaaaagccgagtggttagagtatttaaaagagttacacattcaatttgtagtgtctccattacatgatagggatactgatacagaaggtaggatgaaaaaagagcattatcatattctagtgatgtatgagggtaataaatcttatgaacagataaaaataattaacagaagaattgaatgcgactattccgcagattgcaggaagtgtgaaaggtcttgtgagatatatgcttcacatggacgatcctaataaatttaaatatcaaaaagaagatatgatagtttatggcggtgtagatgttgatgaattattaaagaaaacaacaacagatagatataaattaattaaagaaatgattgagtttattgatgaacaaggaatcgtagaatttaagagtttaatggattatgcaatgaagtttaaatttgatgattggttcccgcttttatgtgataactcggcgtatgttattcaagaatatataaaatcaaatcggtataaatctgaccgatagattttgaatttaggtgtcacaagacactcttttttcgcaccagcgaaaactggtttaagccgactgcgcaaaagacataatcgattcacaaaaaataggcacacgaaaaacaagttaagggatgcagtttatgcatctgtctcttgatcagatctgaattccgatcatattcaataacccttaatataacttcgtataatgtatgctatacgaagttattaggtctgaagaggagtttacgtccagccaagcttaggctcaacgtcaataaagcaattggaataaagaagcgaaaaaggagaagtcggttcagaaaaagaaggatatggatctggagctgtaatataaaaaccttcttcaactaacggggcaggttagtgacattagaaaaccgactgtaaaaagtacagtcggcattatctcatattataaaagccagtcattaggcctatctgacaattcctgaatagagttcataaacaatcctgcatgataaccatcacaaacagaatgatgtacctgtaaagatagcggtaaatatattgaattacctttattaatgaattttcctgctgtaataatgggtagaaggtaattactattattattgatatttaagttaaacccagtaaatgaagtccatggaataatagaaagagaaaaagcattttcaggtataggtgttttgggaaacaatttccccgaaccattatatttctctacatcagaaaggtataaatcataaaactctttgaagtcattctttacaggagtccaaataccagagaatgttttagatacaccatcaaaaattgtataaagtggctctaacttatcccaataacctaactctccgtcgctattgtaaccagttctaaaagctgtatttgagtttatcacccttgtcactaagaaaataaatgcagggtaaaatttatatccttcttgttttatgtttcggtataaaacactaatatcaatttctgtggttatactaaaagtcgtttgttggttcaaataatgattaaatatctcttttctcttccaattgtctaaatcaattttattaaagttcatttgatatgcctcctaaatttttatctaaagtgaatttaggaggcttacttgtctgctttcttcattagaatcaatccttttttaaaagtcaatattactgtaacataaatatatattttaaaaatatcccactttatccaattttcgtttgttgaactaatgggtgctttagttgaagaataaaagaccacattaaaaaatgtggtcttttgtgtttttttaaaggatttgagcgtagcgaaaaatccttttctttcttatcttgatagatccggaacccttaatataacttcgtataatgtatgctatacgaagttattaggtccctcgaagaggttcactagtactggccattgcggccgcataggatccatttgtcgactacttgtgtataagagtcaggagctctgataaatatgaacatgatgagtgatcgttaaatttatactgcaatcggatgcgattattgaataaaagatatgagagatttatctaatttcttttttcttgtaaaaaaagaaagttcttaaaggttttatagttttggtcgtagagcacacggtttaacgacttaattacgaagtaaataagtctagtgtgttagactttatgaaatctatatacgtttatatatatttattatccggatctgcatcgcaggatgctgctggctaccctgtggaacacctacatctgtattaacgaagcgctggcattgaccctgagtgatttttctctggtcccgccgcatccataccgccagttgtttaccctcacaacgttccagtaaccgggcatgttcatcatcagtaacccgtatcgtgagcatcctctctcgtttcatcggtatcattacccccatgaacagaaattcccccttacacggaggcatcaagtgaccaaacaggaaaaaaccgcccttaacatggcccgctttatcagaagccagacattaacgcttctggagaaactcaacgagctggacgcggatgaacaggcagacatctgtgaatcgcttcacgaccacgctgatgagctttaccgcagctgcctcgcgcgtttcggtgatgacggtgaaaacctctgacacatgcagctcccggagacggtcacagcttgtctgtaagcggatgccgggagcagacaagcccgtcagggcgcgtcagcgggtgttggcgggtgtcggggcgcagccatgacccagtcacgtagcgatagcggagtgtatactggcttaactatgcggcatcagagcagattgtactgagagtgcaccatatgcggtgtgaaataccgcacagatgcgtaaggagaaaataccgcatcaggcgctcttccgcttcctcgctcactgactcgctgcgctcggtcgttcggctgcggcgagcggtatcagctcactcaaaggcggtaatacggttatccacagaatcaggggataacgcaggaaagaacatgtgagcaaaaggccagcaaaaggccaggaaccgtaaaaaggccgcgttgctggcgtttttccataggctccgcccccctgacgagcatcacaaaaatcgacgctcaagtcagaggtggcgaaacccgacaggactataaagataccaggcgtttccccctggaagctccctcgtgcgctctcctgttccgaccctgccgcttaccggatacctgtccgcctttctcccttcgggaagcgtggcgctttctcaatgctcacgctgtaggtatctcagttcggtgtaggtcgttcgctccaagctgggctgtgtgcacgaaccccccgttcagcccgaccgctgcgccttatccggtaactatcgtcttgagtccaacccggtaagacacgacttatcgccactggcagcagccactggtaacaggattagcagagcgaggtatgtaggcggtgctacagagttcttgaagtggtggcctaactacggctacactagaaggacagtatttggtatctgcgctctgctgaagccagttaccttcggaaaaagagttggtagctcttgatccggcaaacaaaccaccgctggtagcggtggtttttttgtttgcaagcagcagattacgcgcagaaaaaaaggatctcaagaagatcctttgatcttttctacggggtctgacgctcagtggaacgaaaactcacgttaagggattttggtcatgagattatcaaaaaggatcttcacctagatccttttaaattaaaaatgaagttttaaatcaatctaaagtatatatgagtaaacttggtctgacagttaccaatgcttaatcagtgaggcacctatctcagcgatctgtctatttcgttcatccatagttgcctgactccccgtcgtgtagataactacgatacgggagggcttaccatctggccccagtgctgcaatgataccgcgagacccacgctcaccggctccagatttatcagcaataaaccagccagccggaagggccgagcgcagaagtggtcctgcaactttatccgcctccatccagtctattaattgttgccgggaagctagagtaagtagttcgccagttaatagtttgcgcaacgttgttgccattgctgcaggcatcgtggtgtcacgctcgtcgtttggtatggcttcattcagctccggttcccaacgatcaaggcgagttacatgatcccccatgttgtgcaaaaaagcggttagctccttcggtcctccgatcgttgtcagaagtaagttggccgcagtgttatcactcatggttatggcagcactgcataattctcttactgtcatgccatccgtaagatgcttttctgtgactggtgagtactcaaccaagtcattctgagaatagtgtatgcggcgaccgagttgctcttgcccggcgtcaacacgggataataccgcgccacatagcagaactttaaaagtgctcatcattggaaaacgttcttcggggcgaaaactctcaaggatcttaccgctgttgagatccagttcgatgtaacccactcgtgcacccaactgatcttcagcatcttttactttcaccagcgtttctgggtgagcaaaaacaggaaggcaaaatgccgcaaaaaagggaataagggcgacacggaaatgttgaatactcatactcttcctttttcaatattattgaagcatttatcagggttattgtctcatgagcggatacatatttgaatgtatttagaaaaataaacaaataggggttccgcgcacatttccccgaaaagtgccacctgacgtctaagaaaccattattatcatgacattaacctataaaaataggcgtatcacgaggccctttcgtcttcaa

SEQ ID NO: 575 - DNA, 55 bp, artificial sequence
  primer
cagtaacggatccggggaggtcaaaaagataacatatggaattcaaatataacgg

SEQ ID NO: 576 - DNA, 52 bp, artificial sequence
  primer
atttgtggatccgcggccgcctataaatctgtaacgcaaccttcactagcgg

SEQ ID NO: 577 - DNA, 6790 bp, artificial sequence
  primer
gctagcgggcccttaccaatgcttaatcagtgaggcacctatctcagcgatctgtctatttcgttcatccatagttgcctgactccccgtcgtgtagataactacgatacgggagggcttaccatctggccccagtgctgcaatgataccgcgagacccacgctcaccggctccagatttatcagcaataaaccagccagccggaagggccgagcgcagaagtggtcctgcaactttatccgcctccatccagtctattaattgttgccgggaagctagagtaagtagttcgccagttaatagtttgcgcaacgttgttgccattgctgcaggcatcgtggtgtcacgctcgtcgtttggtatggcttcattcagctccggttcccaacgatcaaggcgagttacatgatcccccatgttgtgcaaaaaagcggttagctccttcggtcctccgatcgttgtcagaagtaagttggccgcagtgttatcactcatggttatggcagcactgcataattctcttactgtcatgccatccgtaagatgcttttctgtgactggtgagtactcaaccaagtcattctgagaatagtgtatgcggcgaccgagttgctcttgcccggcgtcaacacgggataataccgcgccacatagcagaactttaaaagtgctcatcattggaaaacgttcttcggggcgaaaactctcaaggatcttaccgctgttgagatccagttcgatgtaacccactcgtgcacccaactgatcttcagcatcttttactttcaccagcgtttctgggtgagcaaaaacaggaaggcaaaatgccgcaaaaaagggaataagggcgacacggaaatgttgaatactcatactcttcctttttcaatattattgaagcatttatcagggttattgtctcatgagcggatacatatttgaatgtatttagaaaaataaacaaataggggttccgcgcacatttccccgaaaagtgccacctgacgtctaagaaaccattattatcatgacattaacctataaaaataggcgtatcacgaggccctttcgtcttcaagaattctcatgtttgacagcttatcatcgataagctttaatgcgggcgctagcggagtgtatactggcttactatgttggcactgatgagggtgtcagtgaagtgcttcatgtggcaggagaaaaaaggctgcaccggtgcgtcagcagaatatgtgatacaggatatattccgcttcctcgctcactgactcgctacgctcggtcgttcgactgcggcgagcggaaatggcttacgaacggggcggagatttcctggaagatgccaggaagatacttaacagggaagtgagagggccgcggcaaagccgtttttccataggctccgcccccctgacaagcatcacgaaatctgacgctcaaatcagtggtggcgaaacccgacaggactataaagataccaggcgtttccccctggcggctccctcgtgcgctctcctgttcctgcctttcggtttaccggtgtcattccgctgttatggccgcgtttgtctcattccacgcctgacactcagttccgggtaggcagttcgctccaagctggactgtatgcacgaaccccccgttcagtccgaccgctgcgccttatccggtaactatcgtcttgagtccaacccggaaagacatgcaaaagcaccactggcagcagccactggtaattgatttagaggagttagtcttgaagtcatgcgccggttaaggctaaactgaaaggacaagttttggtgactgcgctcctccaagccagttacctcggttcaaagagttggtagctcagagaaccttcgaaaaaccgccctgcaaggcggttttttcgttttcagagcaagagattacgcgcagaccaaaacgatctcaagaagatcatcttattaatcagataaaatatttctagatttcagtgcaatttatctcttcaaatgtagcacctgaagtcagccccatacgatataagttgtcctcgaggaattcgagctccccagcgaaccatttgaggtgataggtaagattataccgaggtatgaaaacgagaattggacctttacagaattactctatgaagcgccatatttaaaaagctaccaagacgaagaggatgaagaggatgaggaggcagattgccttgaatatattgacaatactgataagataatatatcttttatatagaagatatcgccgtatgtaaggatttcagggggcaaggcataggcagcgcgcttatcaatatatctatagaatgggcaaagcataaaaacttgcatggactaatgcttgaaacccaggacaataaccttatagcttgtaaattctatcataattgtggtttcaaaatcggggtcacgatccaaaggagggtgaggaaggatccgcggccgcagatctgagctccccgggcgagagtagggaactgccaggcatcaaataaaacgaaaggctcagtcgaaagactgggcctttcgttttatctgttgtttgtcggtgaacgctctcctgagtaggacaaatccgccgggagcggatttgaacgttgcgaagcaacggcccggagggtggcgggcaggacgcccgccataaactgccaggcatcaaattaagcagaaggccatcctgacggatggcctttttgcgtttctacaaactctttttgtttatttttctaaatacattcaaatatgtatccgctcatgctccgggtcgagcaccaggtgactagtgcatggtcgcaagtttcactagcagccatgctttttttgaatctttgtaggacgttttaaagagaattacccactttaaaattaaacatgcgcttagaatcgctttaggaaacacgatccagtccaataatcgtcgataaaaacttttgaaaaaggttggtgaaattacctacttttggaataatcacaaatcacaagtgattaatcacaaatcacaagtgattaatcacttgtttattaagatattaaaagctataatttaaataaagcgtgaattttattacacaaaaagaggggggagaaacttggaactagcatttagagaaagcttaaaaaagatgagaggtaccaaatcaaaagaaaaattctcccaagaattagaaatgagtagatcaaattattcacgaatagaatcaggaaaatcagatccaaccataaaaacactagaacaaattgcaaagttaactaactcaacgctagtagtggatttaatcccaaatgagccaacagaaccagaaccagaaacagaatcagaacaagtaacattggatttagaaatggaagaagaaaaaagcaatgacttcgtgtgaataatgcacgaaatcgttgcttatttttttttaaaagcggtatactagatataacgaaacaacgaactgaatagaaacgaaaaaagagccatgacacatttataaaatgtttgacgacattttataaatgcatagcccgataagattgccaaaccaacgcttatcagttagtcagatgaactcttccctcgtaagaagttatttaattaactttgtttgaagacggtatataaccgtactatcattatatagggaaatcagagagttttcaagtatctaagctactgaatttaagaattgttaagcaatcaatcggaaatcgtttgattgctttttttgtattcatttatagaaggtggagtttgtatgaatcatgatgaatgtaaaacttatataaaaaatagtttattggagataagaaaattagcaaatatctatacactagaaacgtttaagaaagagttagaaaagagaaatatctacttagaaacaaaatcagataagtatttttcttcggagggggaagattatatatataagttaatagaaaataacaaaataatttattcgattagtggaaaaaaattgacttataaaggaaaaaaatctttttcaaaacatgcaatattgaaacagttgaatgaaaaagcaaaccaagttaattaaacaacctattttataggatttataggaaaggagaacagctgaatgaatatcccttttgttgtagaaactgtgcttcatgacggcttgttaaagtacaaatttaaaaatagtaaaattcgctcaatcactaccaagccaggtaaaagcaaaggggctatttttgcgtatcgctcaaaatcaagcatgattggcggtcgtggtgttgttctgacttccgaggaagcgattcaagaaaatcaagatacatttacacattggacacccaacgtttatcgttatggaacgtatgcagacgaaaaccgttcatacacgaaaggacattctgaaaacaatttaagacaaatcaataccttctttattgattttgatattcacacggcaaaagaaactatttcagcaagcgatattttaacaaccgctattgatttaggttttatgcctactatgattatcaaatctgataaaggttatcaagcatattttgttttagaaacgccagtctatgtgacttcaaaatcagaatttaaatctgtcaaagcagccaaaataatttcgcaaaatatccgagaatattttggaaagtctttgccagttgatctaacgtgtaatcattttggtattgctcgcataccaagaacggacaatgtagaattttttgatcctaattaccgttattctttcaaagaatggcaagattggtctttcaaacaaacagataataagggctttactcgttcaagtctaacggttttaagcggtacagaaggcaaaaaacaagtagatgaaccctggtttaatctcttattgcacgaaacgaaattttcaggagaaaagggtttaatagggcgtaataacgtcatgtttaccctctctttagcctactttagttcaggctattcaatcgaaacgtgcgaatataatatgtttgagtttaataatcgattagatcaacccttagaagaaaaagaagtaatcaaaattgttagaagtgcctattcagaaaactatcaaggggctaatagggaatacattaccattctttgcaaagcttgggtatcaagtgatttaaccagtaaagatttatttgtccgtcaagggtggtttaaattcaagaaaaaaagaagcgaacgtcaacgtgttcatttgtcagaatggaaagaagatttaatggcttatattagcgaaaaaagcgatgtatacaagccttatttagtgacgaccaaaaaagagattagagaagtgctaggcattcctgaacggacattagataaattgctgaaggtactgaaggcgaatcaggaaattttctttaagattaaaccaggaagaaatggtggcattcaacttgctagtgttaaatcattgttgctatcgatcattaaagtaaaaaaagaagaaaaagaaagctatataaaggcgctgacaaattcttttgacttagagcatacattcattcaagagactttaaacaagctagcagaacgccctaaaacggacacacaactcgatttgtttagctatgatacaggctgaaaataaaacccgcactatgccattacatttatatctatgatacgtgtttgttttttctttgctgtttagcgaatgattagcagaaatatacagagtaagattttaattaattattagggggagaaggagagagtagcccgaaaacttttagttggcttggactgaacgaagtgagggaaaggctactaaaacgtcgaggggcagtgagagcgaagcgaacacttgattttttaattttctatcttttataggtcattagagtatacttatttgtcctataaactatttagcagcataatagatttattgaataggtcatttaagttgagcatattagaggaggaaaatcttggagaaatatttgaagaacccgattacatggattggattagttcttgtggttacgtggactagtttttaaaatatatatttatgttacagtaatattgacttttaaaaaaggattgattctaatgaagaaagcagacaagtaagcctcctaaattcactttagataaaaatttaggaggcatatcaaatgaactttaataaaattgatttagacaattggaagagaaaagagatatttaatcattatttgaaccaacaaacgacttttagtataaccacagaaattgatattagtgttttataccgaaacataaaacaagaaggatataaattttaccctgcatttattttcttagtgacaagggtgataaactcaaatacagcttttagaactggttacaatagcgacggagagttaggttattgggataagttagagccactttatacaatttttgatggtgtatctaaaacattctctggtatttggactcctgtaaagaatgacttcaaagagttttatgatttatacctttctgatgtagagaaatataatggttcggggaaattgtttcccaaaacacctatacctgaaaatgctttttctctttctattattccatggacttcatttactgggtttaacttaaatatcaataataatagtaattaccttctacccattattacagcaggaaaattcattaataaaggtaattcaatatatttaccgctatctttacaggtacatcattctgtttgtgatggttatcatgcaggattgtttatgaactctattcaggaattgtcagataggcctaatgactggcttttataatatgaggtcgacgcatgc

SEQ ID NO: 578 - DNA, 24 bp, artificial sequence
  primer
cctccgcaagcaccttgtcctgga

SEQ ID NO: 579 - DNA, 23 bp, artificial sequence
  primer
cggcctttgaagctctggggcaa

SEQ ID NO: 580 - DNA, 24 bp, artificial sequence
  primer
ggaacagctcgtgtttttgacgga

SEQ ID NO: 581 - DNA, 25 bp, artificial sequence
  primer
cctaattatagcgtgacacaaggag

SEQ ID NO: 582 - DNA, 24 bp, artificial sequence
  primer
gctgaaccagcttggttatcagat

SEQ ID NO: 583 - DNA, 26 bp, artificial sequence
  primer
ggtcatcaaacgcaaggaattgatac

SEQ ID NO: 584 - DNA, 24 bp, artificial sequence
  primer
tattgttccctggcaagaggttgc

SEQ ID NO: 585 - DNA, 26 bp, artificial sequence
  primer
gctgtaagagctggtcaccattgtgc

SEQ ID NO: 586 - DNA, 24 bp, artificial sequence
  primer
ccactcatcaaatccacgtcatgc

SEQ ID NO: 587 - DNA, 27 bp, artificial sequence
  primer
cctgagtggatgttagagtttcgtctg

SEQ ID NO: 588 - DNA, 27 bp, artificial sequence
  primer
caatgctctcaatcgcttttgctggag

SEQ ID NO: 589 - DNA, 5191 bp, Lactobacillus plantarum
atggcaaccttggaagttaaagatttacacgttgaagtgacggatgatgagcaaaaaaagtctcgtgagattttaaaaggcgtcaatttatctatgaaaactggtgaaattcatgccattatgggaccaaatgggactggtaagtccactttatcacaaactattatgggccaaccggcttatcacgttactcagggtgatatcttgttgaacggcgaaagtatcgtaaacatgccagttgatgaacgtgcacgtaagggactcttcctcggcatgcagtatccagctgaaattcaaggggtcaccaacgctgaatttttacgggcagcaatgaacgcacgccgaccagccgatgatcaaatctcagtgatggcctttcttaaagaactcgacaagaacttggcactacttaatatgagcgaatccatgacggaacgttacctaaacgaaggtttctccggtggtgaaaagaagcgtaacgaaattttgcaattattgatgatcaagccatcattcgccttattggacgaaattgattccgggcttgatatcgatgcgttacaagtggtttctaagggtgttaattcgatgcggggcgataatttcggctcattgattatcacgcattatcaacggctgttaaactacattgtgcccgatgtcgttcacgtgatgatgggtggtcgaatcgtgaagactggtaacgccgacttagcaaagacccttgaaaaagaaggttatgctggtttacgtgacgatttgaacattgatgtcaaacttgttgacgacgaagattagggggtggcagtaatggaagcaactgctgattatgaaactatcaaaacaacgctagctgcggctgctaacgaacatggtgaaccgcactggctcgttgaacgccgtttagcggctttagatgcgatgcaaggcctagcggttcccaaagctgatcgctttagtattcgcgactggccactgacgcccaccgaccaaccactaaagttcagtcgttcggatcgaactttagcaactgatgtaacggccgaagctggtcatatccaaatcgtacaagttgggcagacaacggtgaccgtcaatttgcctgatgaactagatgatcaaggcgtcattttgaccgatatgttcacggcctttcgcgaacatccgcaactaactgaaaaacattttatggacaaagtcgtcaaaactgacgaggaccgattgaccagttaccataccgcgtttttgaacgccggggtcttcctctatgttcctaaaggggttactgtcaaagaaccaatcgagatcaccacgatccaggatagtacccgagtgcaaccgttaattagtcatgtcttgattgtggctgaacaagacagtcatttcgcagtaactcagcacctgacaacgaagggtgacgtcgataatatcgccaactgtgttgtagaaattttggcacgggctgacagtgaagtgcatttttcagcgttcgatgaactcggggccaacacgactgcttatttgaatcggcgggccgcaatcagtcggggagccaaagtcgattgggctatcgggatgatgaataatggtaacactttcggggactttgactcggaactgatcggtgaaggcgccaaatccgatgccaaggtcatcacagtgacgactaaggcccaggatgtctgcgttaatacgcgggtcactaaccgtggtaagaagactgacggcaatatcgtacaacgtggggtcattatggaaaagtctaacctgatttttaacggaatcggtcacattattcacggggcctccggtgcacatgctgaacaggaaaatcgggttttgatgatgtctgatgatgcccatggtgacgcgaacccgattctattgatcgatgaaaatgacgtgttagctggacatgcagcaagtgttggtcaaattgatcaaaatcaaatgtactatttgatgagtcgcgggattgataaaccacaggcccaacggttggttattcggggcttcttaagtaccgtgattggtgcgatcccatcgaagactgtccggactcgcttaacgaacacgattgaaaggaagcttgaagatggaatccaattttgagacgttacggtcagattttcccattctaaaccaacaagtgaatgatgaacgacttgtctacctggataatgcggcgactgctcagcgccccaaccaagtcgtggatgcgctcgttcacttttatcaacacgataatgccaatgttcatcgcggtgtgcacaccttagcagagcgggccactagtcaatacgaagctgcgcgcgccaaggtgcaacggttcatcaatgctgcaaaaacggatgaaatcgtcttcaccaaagggacgacggatagtctcaatctgattgccagtacttatggcgaagccaatattcaagcgggtgatgagatcgtcatttccattatggagcaccatagtaatttaattccgtggcaacagttagcattgcgtaagcacgccaccttgaaatatattgagttaacggcgactggtgaattggacatggccgatgctgccaacaagattacggatcgaacaaaaatcgtttcagtgacccatgctagtaatgtattgggaacggtcaatccaatcaaggcgttagcacgattggcgcatcaacacggtgccctgatgattgcggatggggcgcaagcagcccctcatatgccggtcgatgtccaggcactcgatgttgatttttacgcattttcggggcataaaatgctgggaccaaccggcattggcgttctatatggtcgtgagaatttattagctacgatgccaccgtatcaatttggtggtgagatgattggctttgttcaccgtgatgacagtacctgggcggaactaccgtggaagtttgaagcgggcactcagaacattgccggtgcgatcggcttgggcgcggcggttgattatttgacgcaactcggtatggatcaagttcagcaacacgaacagcaattagtcaattacttattgcctaagttgattgcaatgcctggtgtcacggtctacggtccccaagatccccaacatcatacgggcgtcatcgcctttaatatcgacggtttgcacccgcacgacgcggctaccgcgttggatatggaaggtgtcgccgttcgcgcgggtcatcactgtgcacaacccctgatggcagcgctcggcttagtagcaactgcacgggctagtttttacatttacaatacacaagcggacgctgatcaattattaacgtcactccaagcaacaaaggagtttttcgaacatgggactgtctaaattaagtggcttatatcgcgaagtgattttagatcatggtgatcatccgcatcataaaaatgcgttgccaaacgcaacacatgccattacgttgaaaaatccaacttgtggcgacgtcatcaatttggctattcaattggatgcgcatgatcaaatcgaagatattggatttacgggtgagggctgtaccatcagtcaagcatcggccagtatgatgacggatgcggtgatgggtaagtcgaaagaacaggcattggcaatggctaagacattttcggatatggcgattggcaagcaacacccgcaggccgatatggatgccttagaagacgccgcaattttatcgaatattatgcaatttccggcacgaatcaaatgtgccacgctagcttggtgggctttgcaacgggcattgcttgctgaaaatggcaatgaggaggaatcagaagtatgagtgaagtacctgacgtggtcaaaaatgaccgtgattatgaatatggatttcatgacgatgtcaaaccagcatattcaactgggcgaggattaacggaagccacggtgcgcgaaatttccgcggcaaaacatgagccacaatggatgttggattatcggttaaatgcctatcatgagtatttaaagatgccgatgcctaagtttggcccggatctcacgaaactcgacttgaaggacatgctgtattatcagaagatgaccgataaaaagttccgtgactggaaagaagtcccagctgacttgaagcggacgttcgaccggttaggtgtgcctgaagctgaacggaaatacttagccggttcatcggcgcagtatgaatctgaagtcgtttatcacaatatgcgtaaagattttgaaaagttaggtattatttttaccgataccgatacggcgcttcacgattatccagaactgttcaagaagtggtttgggaaactcgtcaaaccaaccgataacaagtttgcggctttaaacgcggcagtctggtcaggtgggtccttcatttatgtgcctaagggtgtccagacgaagacgccaattcagtcatatttccggttaaatgctgaaaactcgggtcagtttgagcggactttgattatcgtggaagatggtgccagtgtcgactatgtcgaagggtgtacggcccctaattattcttcagatagtttgcacgcggccgttgttgaagtcaatgttgagcccaacgcttactgccgttatacaacgattcaaaactggtctgacaatgtttatagcctggaaactaagcgagctgcagcggccgaaaatgccacgatggaatgggtcgatgggaatttaggttcgaaggttacgatgaagtacccaagcgtttatttgaatggggaaggtgcccgcgggaccatgttatcgatcgcggttgccagcaatggcatccaccaagattctggtgctcggatgattcataatgctaagaatacctccagttcgattgtttcgaagtccatcgctaagactggtggtgcgactgattaccgtggaaccgtgcgttttgccaagcattcagacggttccaaagcgcatgttgagtgtgatacgatcatcatggatgaccagtcgtcttccaacacgattccgtataatgaaatcgacagtgctaacgtcgcgatggaacacgaagctaaggtgtccaaaatctcagaagaacagctctactacttgatgagccgaggaatttcagaagctaaggcaaccgaaatgattatcatgggattcgtagaaccatttacgaagcaattaccgatggaatatgctgttgaattaaaccggttaatcagctttgagatggaaggttcaatcgggtag

SEQ ID NO: 590 - DNA, 20 bp, artificial sequence
  ribosome binding site
atataggaggaatttttgta

SEQ ID NO: 591 - DNA, 252 bp, Lactobacillus plantarum
taagtcgtattggcaccactactcacaccgtgaccgacgcgcccgccagtcaagtgttcaaaagttagcgtttattaagtgcgataagtataccacaaagggcttattgacgcccgccaaagggttttgcggacattgttaataattgtattaaaagcatgctcaatctaacacttattttgcacaaacatggtatactttaaccgtaaaaactaaattttcactacgagaggatgacttattttgtcaagc

SEQ ID NO: 592 - DNA, 44 bp, artificial sequence
  primer
aagctagcggatccaaacaattgaaagaatttaggaggatcacc

SEQ ID NO: 593 - DNA, 44 bp, artificial sequence
  primer
atacgtgcggccgcctagattttcataataccgccggtgttggc

SEQ ID NO: 594 - DNA, 7829 bp, artificial sequence
  vector
atggaattcaaatataacggaaaagttgaatcagtggaactcaataaatattctaagacattgactcaagatccaacacaaccagcgactcaagcgatgtactacggcattggttttaaagatgaggatttcaaaaaagctcaggtcggaatcgtcagcatggattgggacggaaatccatgtaatatgcacttgggaacacttgggagtaaaatcaaaagttctgtcaaccaaactgacggattgattggacttcaatttcatactattggagtttctgatggaattgctaacggaaagcttggcatgagatattctttggtcagtcgtgaagttattgctgacagcatcgaaaccaacgctggcgcagaatattatgatgccatcgttgccattcccggttgtgataaaaatatgcccgggtcaattatcggaatggctcgcttaaatcgtccgtcaattatggtctatggtggaacgattgaacatggcgaatataaaggtgaaaaattaaatattgtttcggcctttgaagctctggggcaaaaaatcactggaaatatttctgatgaagattatcatggcgttatttgcaatgccattccaggacaaggtgcttgcggaggaatgtacactgccaataccctggctgctgctattgaaactttgggaatgagtttaccttattcctcttccaatccagcagtcagtcaagaaaaacaagaagagtgtgatgacattggtttagccatcaaaaatttattagaaaaagatattaaaccaagtgatatcatgaccaaagaagcttttgaaaatgccataacaattgtcatggtccttggaggctcaaccaatgctgtgcttcatatcattgcaatggcaaatgccattggtgtagaaattacgcaagatgatttccaacgtatttcagatattacccctgttcttggcgatttcaaaccgagcggaaaatatatgatggaagatctgcacaaaattggtggccttcctgctgttttgaaatacctacttaaagaaggaaaacttcacggtgattgtttgaccgtcacaggtaaaactttggctgaaaatgttgaaacagcattagatttggactttgacagtcaagatattatgcgaccactaaaaaatccaattaaagctactggacatttacaaattttgtacggtaatcttgcccaagggggttctgttgcaaaaatttctggtaaagaaggcgaatttttcaaaggaacagctcgtgtttttgacggagaacaacactttatcgatggcattgagtctggccgattgcatgccggtgatgttgcggtcattagaaatattggcccagtcggaggtccgggaatgccagagatgttaaaaccaacctcagcattaattggagcaggacttggaaaatcttgtgccctaattactgacggaagattttctggtggcacacacggctttgttgtgggtcatatcgtccctgaagcagttgaaggtgggttgattggtttagttgaagatgatgatattatcgaaattgatgcggtgaataatagtattagtttaaaagtttctaatgaagaaattgctaaacgacgtgccaattatcaaaaaccaacccctaaagcaacgcgtggtgttcttgcaaaatttgccaaacttacgcgccccgctagtgaaggttgcgttacagatttataggcggccgcgacaattcaaaggagcgaaaaaatggctacacttgaaattaaaaatcttcatgtggcgattgaagataaagagattctcaaaggggtcaatctagtcatcaacaccaatgaaatccatgcgattatgggacctaatgggactggtaaatcaacattatctgctgcaattatgggaaatcctaattatagcgtgacacaaggagaagttctttttgacggtcaaaacgttttagaaatgagcgttgatgaaagagctcgtcttggacttttccttgccatgcaatatccatctgaaattccaggaattacgaatgcagaatttttgcgagcagcaatgaatgctaaacgtgctgaggatgacaaagtttctgttatggaatttatcaaaaaattggataaaaatatggaagttttgagcatgaaagaagaaatggctgagcgctatctcaatgaaggcttttctggtggtgaaaagaaacgtaatgaaatccttcaacttttgatgttagaaccaacttttgccattcttgatgaaattgactcaggacttgatattgatgctttaaaagttgttgctaaaggtgttaattcaatgcgtggtgagaaatttggggcattgattattacccactatcaacgtttgcttgattatattacaccagatgttgtccacattatgatggatggtcgtgtggtgaaaacaggtggcgcagaactagctaaacgtctagaaactgaaggatatgtcaatatcgctgaggaacttggattagaatataaagaagaagtttaaggaaaggagatagtaagttatttttgcttactgacagagctgtcagtaagtctaaaattcattaatttagtgacagaatgttttgtcagcaaattaatgaattcagttaagaaaatgcaaacttgctaatattaattatgaatcaagaaatcttaaacttttcacaaatgcatgctgaaccagcttggttatcagatttacgtcaaaaagctgcacttgaatttgaaaatctagaattacctaatattgaacgagtaaaaattaatcgttggggcttagaccatttaagcatttctgaaaacgaagaaattggatctgttcctacttttacggaaattccaaatcatcctttgcttgttcaagtcggaagtcaaacagttatggaacaaatgacaccaaatttggctgaacaaggcgtaattttcacagatttcaattcagctttaaccgaaattcctgaactacttgaggaaaattttggttctgtggttccatttaatgaaagtcgtttaacagcagcaaatactgtgacatttaattctggattagttctttatgttccagatggtgtggaagtacttgaacccattgaatcaattttgatgcaagagggttcatcagaagttccttttaataaacgaattttaattatcgttggaaaaaatgccaaagttgactaccttgaacgtttggaaacaagtgatgagcaaagctcaaaggcaaaagcaaatattgtcgttgaagtaattgcaaaggcaggggctcaagtcaaatttgcagccattgaccgtttaggagaaaatgttacagcttcagttgttcgtcgcggattgattggtgataatgcaacagttgactggtccgttggtgtcatgaatgatggaaatgttgttgctgactttgatagtgacctcaaagggaatggttctcattcacaaattaaagtggttgggatttcaacaggtcatcaaacgcaaggaattgatacaagagtgactaattttggtctaaattcggttggtcatatcttgcaaaatggtgtaattcttgataaaggaactttgacatttaatgccattggtcatattatcaaaggggcgaaaaatgcggatgctcaacaatcttctcacgttttaatgctttctgataaaggacgaggagatgcaaatccaattctcttgattgatgaaaatgaagtaactgcgggtcacgcagcttctgttggtcaggtagatgaggaagatttattctatcttcaatctcgtggacttgatgaagaaactgctaaacgacttgttattcgaggatttctcggttcagttgtcagtgaaattcctgtcaaatcagtccaagcagaatttattgaaactattgaaagaaagctgggcatgtaatgcttgaaggcatcaaaaaagattttccagtattgaatcaaattgttaatgatgaacctttggtctatttggacaatgcggcaactactcaaaaacctttgaaggttttggctgcgataaaagattattatgaaaatgataatgctaatgtccaccgtggtgttcatactttggcagagcgagcaactgaaaaatacgaagcggcgcgtgaaaaagtccgtcagtttatcaatgctaaatcaacaaaagaggttttgtttactagaggaacaacgacttcaatcaactgggttgctcagtttgccgggcaaatcttaaaaacaggggatgaaattgtcatttcgattatggaacaccattctaatattgttccctggcaagaggttgctaagaaaactggagcaatcttaaagtttgtctatcttaaagatggtcagctagatatggatgatttacgtaaaaaaatcactaatcaaactaaatttgtatcgattgctcatgtttctaatgtattagggacaattaatccagtagaagaaattaccaaaattgctcatgaacacggtgcttacatggcggttgatggtgcacaatctacaccacatatggcgattgaccttcaaaaaatggatgtcgatttctttgctttctcaggtcataaaatgatgggaccaactggaattggcgttctttatggcaaagaagaacttctaaatcaatttgaacctgtcgaatttgggggagaaatgattgattttgtttatgaaagtcattcaacatggacagaacttccttggaaatttgaagctggcacacctaatattgcgggtgctattgctttaggagctgcaattgattatattcaagagcttgggattgaccaaattcatcagcacgaaattgaattgattgattacctaatgccaaaacttcaagaaattgaaggcttaaagatttatggaccgaaagataatgtaaaaagaggcggtctaattgcttttaatattgaaggacttcatccacatgatgtcgcaactgcccttgatatggagggggtagctgtaagagctggtcaccattgtgctcaacctttattgaattatctcgaaactccggcaactgctagagcaagcttttatctttataatacaaaagcagattgtgataaattagttgaagcacttaaaaaaacaaaggagtttttcaaccttgattaatatgcttaattgggtcgcctccctcccactttggttggcaaccacatttttatttgttgttgttttctttagagctcaatgtactttttggttaggaaaattgagttatcatggaattttgaaaacgaagtggggcaaaaaacttgagaaaaattcagagacttccgctggaattttagccattcaaaaaatgggttggccaattattcctctgtcttttttaacagtcggttttcaaactgctgttcaatttggcgctggcctaacaaattggtcttggtataaatacacattggctgcgattccaggttacttagcttggggatttatctatgcctccggaggactaagcctatttcgttcactcgttcagggttcgattggcttactcattctatttatcatcatcattttagctgtggtaattgcagcaaacctcgtccttcgttatattcgtaaaaatggaataaaaacggatgattagagaacaagaataatcaaaaagttactgacagaaattttataagtcattaaagaaggctgtcagtaacttttagaatttatttttatcaatattaaaataaagaaagtgtgaaaatgtggctttatctaaattagataatctatatcgtgcagtaattcttgaccactcatcaaatccacgtcatgctggagaattacagacaggatgtatggttgacctcaacaatccaacctgtggtgatgtgattcgcctgactgttgaatttgaaaatgatgtcatttcaaacattgcttttagtggccatggctgcacaatctcaacagcttcagcttcaatgatgaccgttgctgttcttggaaaaacaaaagaagaagcaaaagagctggcaactattttttcagcaatggtgaccggtgaaactgacgaacgacaagaaaaacttggagatgctcagtttcttgcaggggttagtaaatttccagctcgagtaaaatgctccactctggcttggaatgccctaaaaaaagccattgatgttggtgaagcacaagaaacagtaattcatggcgaatagctaaaagttactgacagattttttatcagcaaataaaaactcgtcagtaaaactgatgagcttgtcagtagcggctgaaaaaagctttttatcaatggataaaggacttgttagtaaggctgacaagtctgtcagtaaaaagcgattgaattgagctttttatcaatggatgaaggatttgtcagcaaagctgacaagtctgtcagtaataaatatgccaaagaggaagaaaaatgacagaaaatagtacacaagaagtcgtcaaagacctcgaagaatataaatttggatttcacgataatgcagaacttgaattcacaacaggtttaggtttgaccgaagaagttattcgcgaaatttctgaaacaaaaaatgaacctgagtggatgttagagtttcgtctgaaatcttttgaagcttttaaaaaattggacatgccaaaatggggcccagatctttctggtattgattttaatgatattgtttattatcaaaaaccatcagcaaaagctgcgcgttcttgggaagacgttcctcaagaaatcaaagacacttttgaaaaaattggtattccagaagctgaacgttcatatttggcaggagcttctgctcaatatgaatcagaagttgtttatcataatatgaaagatgaatttgaaaaattaggaattattttcactgacactgattcaggattacgtgactatccagaaattttcaaaaaatatttcagcaaactcgttccaccaacggataacaaattggcagccttaaattctgccgtttggtctggagggtcatttgtctatgttcctaaaggagtcaaatgtgagattccgattcaagcttatttccgtattaacaacgaaaaatcaggacagtttgaacggacattgattattgttgaagaaggggcatctattcagtacgttgaaggatgtactgcaccaacttactctgcaagttcacttcatgcagcagtggttgaaatctttgttgaagagggtggttatatgcgctactctactattcaaaactggtcagataacgtctataatctggttaccaagcgtgctgctgcagaaaaaaatgcgacggttgaatggattgacggaaacttagggtcaaaagtatccatgaaatacccagccgttcatttgaatggaccaggagcgcgtggaacaatgctctcaatcgcttttgctggagcaaaccaaaatcaagatacaggtgctaaaatgattcataacgcaccaaatacttcaagttcaatcatttctaagtctattgccaaaaatggtggagcagtcaattaccgtggacaagttacttttggaaaaaattctaaaaaatctgcttctcatattgaatgtgacacaattttaatggatgatttatcaaaatcagataccgtaccattcaatgaaattcataattcacaagtcgccttggaacacgaggcgaaagtgtcaaaaatttcagaagaacaactctattatttgatgagtcgtggacttacagaaaaagaagcaactgacatgattgtcatgggcttcattgaaccctttaccaaagaattgccaatggaatacgctgttgaattaaatcgcttgatttcttattcaatggagggttctattgggtaa

SEQ ID NO: 595 - DNA, 795 bp, Lactobacillus plantarum
atggcaaccttggaagttaaagatttacacgttgaagtgacggatgatgagcaaaaaaagtctcgtgagattttaaaaggcgtcaatttatctatgaaaactggtgaaattcatgccattatgggaccaaatgggactggtaagtccactttatcacaaactattatgggccaaccggcttatcacgttactcagggtgatatcttgttgaacggcgaaagtatcgtaaacatgccagttgatgaacgtgcacgtaagggactcttcctcggcatgcagtatccagctgaaattcaaggggtcaccaacgctgaatttttacgggcagcaatgaacgcacgccgaccagccgatgatcaaatctcagtgatggcctttcttaaagaactcgacaagaacttggcactacttaatatgagcgaatccatgacggaacgttacctaaacgaaggtttctccggtggtgaaaagaagcgtaacgaaattttgcaattattgatgatcaagccatcattcgccttattggacgaaattgattccgggcttgatatcgatgcgttacaagtggtttctaagggtgttaattcgatgcggggcgataatttcggctcattgattatcacgcattatcaacggctgttaaactacattgtgcccgatgtcgttcacgtgatgatgggtggtcgaatcgtgaagactggtaacgccgacttagcaaagacccttgaaaaagaaggttatgctggtttacgtgacgatttgaacattgatgtcaaacttgttgacgacgaagat

SEQ ID NO: 596 - protein, 265 aa, Lactobacillus plantarum
MATLEVKDLHVEVTDDEQKKSREILKGVNLSMKTGEIHAIMGPNGTGKSTLSQTIMGQPAYHVTQGDILLNGESIVNMPVDERARKGLFLGMQYPAEIQGVTNAEFLRAAMNARRPADDQISVMAFLKELDKNLALLNMSESMTERYLNEGFSGGEKKRNEILQLLMIKPSFALLDEIDSGLDIDALQVVSKGVNSMRGDNFGSLIITHYQRLLNYIVPDVVHVMMGGRIVKTGNADLAKTLEKEGYAGLRDDLNIDVKLVDDED

SEQ ID NO: 597 - DNA, 768 bp, Lactococcus lactis
atggctacacttgaaattaaaaatcttcatgtggcgattgaagataaagagattctcaaaggggtcaatctagtcatcaacaccaatgaaatccatgcgattatgggacctaatgggactggtaaatcaacattatctgctgcaattatgggaaatcctaattatagcgtgacacaaggagaagttctttttgacggtcaaaacgttttagaaatgagcgttgatgaaagagctcgtcttggacttttccttgccatgcaatatccatctgaaattccaggaattacgaatgcagaatttttgcgagcagcaatgaatgctaaacgtgctgaggatgacaaagtttctgttatggaatttatcaaaaaattggataaaaatatggaagttttgagcatgaaagaagaaatggctgagcgctatctcaatgaaggcttttctggtggtgaaaagaaacgtaatgaaatccttcaacttttgatgttagaaccaacttttgccattcttgatgaaattgactcaggacttgatattgatgctttaaaagttgttgctaaaggtgttaattcaatgcgtggtgagaaatttggggcattgattattacccactatcaacgtttgcttgattatattacaccagatgttgtccacattatgatggatggtcgtgtggtgaaaacaggtggcgcagaactagctaaacgtctagaaactgaaggatatgtcaatatcgctgaggaacttggattagaatataaagaagaagtt

SEQ ID NO: 598 - protein, 256 aa, Lactococcus lactis
MATLEIKNLHVAIEDKEILKGVNLVINTNEIHAIMGPNGTGKSTLSAAIMGNPNYSVTQGEVLFDGQNVLEMSVDERARLGLFLAMQYPSEIPGITNAEFLRAAMNAKRAEDDKVSVMEFIKKLDKNMEVLSMKEEMAERYLNEGFSGGEKKRNEILQLLMLEPTFAILDEIDSGLDIDALKVVAKGVNSMRGEKFGALIITHYQRLLDYITPDVVHIMMDGRVVKTGGAELAKRLETEGYVNIAEELGLEYKEEV

SEQ ID NO: 599 - DNA, 744 bp, Escherichia coli
atgttaagtattaaagatttacacgtcagcgtggaagataaagctatcctgcgcggattaagcctcgacgttcatcccggcgaagttcacgccattatggggccaaacggttcgggcaaaagtaccttatcggcaacgcttgccgggcgagaagattatgaagtgacgggcggcacggttgagttcaaaggcaaagatttgcttgcgctgtcgccggaagatcgcgcgggcgaaggcatctttatggccttccagtatccggtggagattccaggtgtcagtaaccagtttttcctgcaaacggcacttaatgcggtgcgcagctatcgcggccaggaaacgctcgaccgctttgattttcaggatttgatggaagagaaaatcgctctcctgaagatgccggaagatttattaacccgttcggtaaacgttggtttttccggcggcgagaaaaagcgcaacgatattttgcaaatggcggtgctggaaccggagttatgcattcttgatgagtcggactccgggctggatattgacgcattaaaagtggtcgccgatggcgtgaactcgctgcgtgatggcaagcgctcattcatcattgttacgcactaccaacgcattctcgactacatcaagcctgattacgttcatgtgctatatcagggacgaattgtgaaatccggcgatttcacgttggtcaaacaactggaggagcagggttatggctggcttaccgaacagcag

SEQ ID NO: 600 - protein, 248 aa, Escherichia coli
MLSIKDLHVSVEDKAILRGLSLDVHPGEVHAIMGPNGSGKSTLSATLAGREDYEVTGGTVEFKGKDLLALSPEDRAGEGIFMAFQYPVEIPGVSNQFFLQTALNAVRSYRGQETLDRFDFQDLMEEKIALLKMPEDLLTRSVNVGFSGGEKKRNDILQMAVLEPELCILDESDSGLDIDALKVVADGVNSLRDGKRSFIIVTHYQRILDYIKPDYVHVLYQGRIVKSGDFTLVKQLEEQGYGWLTEQQ

SEQ ID NO: 601 - DNA, 1299 bp, Lactobacillus plantarum
atggaagcaactgctgattatgaaactatcaaaacaacgctagctgcggctgctaacgaacatggtgaaccgcactggctcgttgaacgccgtttagcggctttagatgcgatgcaaggcctagcggttcccaaagctgatcgctttagtattcgcgactggccactgacgcccaccgaccaaccactaaagttcagtcgttcggatcgaactttagcaactgatgtaacggccgaagctggtcatatccaaatcgtacaagttgggcagacaacggtgaccgtcaatttgcctgatgaactagatgatcaaggcgtcattttgaccgatatgttcacggcctttcgcgaacatccgcaactaactgaaaaacattttatggacaaagtcgtcaaaactgacgaggaccgattgaccagttaccataccgcgtttttgaacgccggggtcttcctctatgttcctaaaggggttactgtcaaagaaccaatcgagatcaccacgatccaggatagtacccgagtgcaaccgttaattagtcatgtcttgattgtggctgaacaagacagtcatttcgcagtaactcagcacctgacaacgaagggtgacgtcgataatatcgccaactgtgttgtagaaattttggcacgggctgacagtgaagtgcatttttcagcgttcgatgaactcggggccaacacgactgcttatttgaatcggcgggccgcaatcagtcggggagccaaagtcgattgggctatcgggatgatgaataatggtaacactttcggggactttgactcggaactgatcggtgaaggcgccaaatccgatgccaaggtcatcacagtgacgactaaggcccaggatgtctgcgttaatacgcgggtcactaaccgtggtaagaagactgacggcaatatcgtacaacgtggggtcattatggaaaagtctaacctgatttttaacggaatcggtcacattattcacggggcctccggtgcacatgctgaacaggaaaatcgggttttgatgatgtctgatgatgcccatggtgacgcgaacccgattctattgatcgatgaaaatgacgtgttagctggacatgcagcaagtgttggtcaaattgatcaaaatcaaatgtactatttgatgagtcgcgggattgataaaccacaggcccaacggttggttattcggggcttcttaagtaccgtgattggtgcgatcccatcgaagactgtccggactcgcttaacgaacacgattgaaaggaagcttgaagatggaatccaattt

SEQ ID NO: 602 - protein, 433 aa, Lactobacillus plantarum
MEATADYETIKTTLAAAANEHGEPHWLVERRLAALDAMQGLAVPKADRFSIRDWPLTPTDQPLKFSRSDRTLATDVTAEAGHIQIVQVGQTTVTVNLPDELDDQGVILTDMFTAFREHPQLTEKHFMDKVVKTDEDRLTSYHTAFLNAGVFLYVPKGVTVKEPIEITTIQDSTRVQPLISHVLIVAEQDSHFAVTQHLTTKGDVDNIANCVVEILARADSEVHFSAFDELGANTTAYLNRRAAISRGAKVDWAIGMMNNGNTFGDFDSELIGEGAKSDAKVITVTTKAQDVCVNTRVTNRGKKTDGNIVQRGVIMEKSNLIFNGIGHIIHGASGAHAEQENRVLMMSDDAHGDANPILLIDENDVLAGHAASVGQIDQNQMYYLMSRGIDKPQAQRLVIRGFLSTVIGAIPSKTVRTRLTNTIERKLEDGIQF

SEQ ID NO: 603 - DNA, 1254 bp, Lactococcus lactis
atgaatcaagaaatcttaaacttttcacaaatgcatgctgaaccagcttggttatcagatttacgtcaaaaagctgcacttgaatttgaaaatctagaattacctaatattgaacgagtaaaaattaatcgttggggcttagaccatttaagcatttctgaaaacgaagaaattggatctgttcctacttttacggaaattccaaatcatcctttgcttgttcaagtcggaagtcaaacagttatggaacaaatgacaccaaatttggctgaacaaggcgtaattttcacagatttcaattcagctttaaccgaaattcctgaactacttgaggaaaattttggttctgtggttccatttaatgaaagtcgtttaacagcagcaaatactgtgacatttaattctggattagttctttatgttccagatggtgtggaagtacttgaacccattgaatcaattttgatgcaagagggttcatcagaagttccttttaataaacgaattttaattatcgttggaaaaaatgccaaagttgactaccttgaacgtttggaaacaagtgatgagcaaagctcaaaggcaaaagcaaatattgtcgttgaagtaattgcaaaggcaggggctcaagtcaaatttgcagccattgaccgtttaggagaaaatgttacagcttcagttgttcgtcgcggattgattggtgataatgcaacagttgactggtccgttggtgtcatgaatgatggaaatgttgttgctgactttgatagtgacctcaaagggaatggttctcattcacaaattaaagtggttgggatttcaacaggtcatcaaacgcaaggaattgatacaagagtgactaattttggtctaaattcggttggtcatatcttgcaaaatggtgtaattcttgataaaggaactttgacatttaatgccattggtcatattatcaaaggggcgaaaaatgcggatgctcaacaatcttctcacgttttaatgctttctgataaaggacgaggagatgcaaatccaattctcttgattgatgaaaatgaagtaactgcgggtcacgcagcttctgttggtcaggtagatgaggaagatttattctatcttcaatctcgtggacttgatgaagaaactgctaaacgacttgttattcgaggatttctcggttcagttgtcagtgaaattcctgtcaaatcagtccaagcagaatttattgaaactattgaaagaaagctgggcatg

SEQ ID NO: 604 - protein, 418 aa, Lactococcus lactis
MNQEILNFSQMHAEPAWLSDLRQKAALEFENLELPNIERVKINRWGLDHLSISENEEIGSVPTFTEIPNHPLLVQVGSQTVMEQMTPNLAEQGVIFTDFNSALTEIPELLEENFGSVVPFNESRLTAANTVTFNSGLVLYVPDGVEVLEPIESILMQEGSSEVPFNKRILIIVGKNAKVDYLERLETSDEQSSKAKANIVVEVIAKAGAQVKFAAIDRLGENVTASVVRRGLIGDNATVDWSVGVMNDGNVVADFDSDLKGNGSHSQIKVVGISTGHQTQGIDTRVTNFGLNSVGHILQNGVILDKGTLTFNAIGHIIKGAKNADAQQSSHVLMLSDKGRGDANPILLIDENEVTAGHAASVGQVDEEDLFYLQSRGLDEETAKRLVIRGFLGSVVSEIPVKSVQAEFIETIERKLGM

SEQ ID NO: 605 - DNA, 1269 bp, Escherichia coli
atggctggcttaccgaacagcagtaacgcgctgcaacagtggcatcacttgtttgaagctgaagggacaaaacgctccccgcaagcacagcagcatttacaacaattgctgcgtaccggactgccgacacgtaaacatgaaaactggaaatatacgccgctggaagggctgatcaatagccagtttgtcagcattgcgggagagatatccccacagcagcgtgatgccttagcgttaacgttagactccgtgcggctggtgtttgtcgatgggcgttacgtgcccgcactgagcgatgcaactgaaggcagcggatatgaagtgagcattaacgacgaccgtcagggtttacccgacgctattcaggcggaagtgtttctgcatttgacggaaagcctggcacaaagcgtgacgcatatcgccgtgaagcgcggtcaacggccggcaaagccattgctgttaatgcatatcacccagggcgtggcaggtgaagaggtgaacactgcccattaccgacatcatctggatctggcggaaggtgccgaagcaacggtgatcgaacattttgtcagcctgaatgatgctcgtcattttaccggggcacggttcactatcaacgtcgcagcgaatgcccacttgcagcatatcaagctggcgtttgaaaacccgctcagtcaccactttgctcataacgatttgttgctggctgaggatgccaccgcatttagccacagtttcctgctgggtggcgcagtgttacgacacaacaccagtacgcaactcaatggcgaaaacagcacgctgcggatcaatagcctggcgatgccggtgaaaaacgaggtgtgtgatacccgtacctggctggaacacaataaaggtttttgtaacagccgacagttgcacaaaactatcgtcagcgacaaaggccgcgcggtatttaacggtttgatcaacgtcgcgcagcacgccatcaaaacggatggtcagatgaccaacaacaatctgctgatgggcaaactggcggaagtggatacgaaaccgcagctggaaatctatgcagatgatgtgaaatgcagccacggcgcgacggtggggcgtattgatgatgaacagatattctatctgcgctcgcgcgggatcaatcagcaggatgcccagcagatgatcatttacgccttcgctgccgaactgacggaagcactgcgtgatgaggggcttaaacagcaggtgctggcccgaatcggtcaacggctgccaggaggtgcaaga

SEQ ID NO: 606 - protein, 423 aa, Escherichia coli
MAGLPNSSNALQQWHHLFEAEGTKRSPQAQQHLQQLLRTGLPTRKHENWKYTPLEGLINSQFVSIAGEISPQQRDALALTLDSVRLVFVDGRYVPALSDATEGSGYEVSINDDRQGLPDAIQAEVFLHLTESLAQSVTHIAVKRGQRPAKPLLLMHITQGVAGEEVNTAHYRHHLDLAEGAEATVIEHFVSLNDARHFTGARFTINVAANAHLQHIKLAFENPLSHHFAHNDLLLAEDATAFSHSFLLGGAVLRHNTSTQLNGENSTLRINSLAMPVKNEVCDTRTWLEHNKGFCNSRQLHKTIVSDKGRAVFNGLINVAQHAIKTDGQMTNNNLLMGKLAEVDTKPQLEIYADDVKCSHGATVGRIDDEQIFYLRSRGINQQDAQQMIIYAFAAELTEALRDEGLKQQVLARIGQRLPGGAR

SEQ ID NO: 607 - DNA, 1404 bp, Lactobacillus plantarum
atgagtgaagtacctgacgtggtcaaaaatgaccgtgattatgaatatggatttcatgacgatgtcaaaccagcatattcaactgggcgaggattaacggaagccacggtgcgcgaaatttccgcggcaaaacatgagccacaatggatgttggattatcggttaaatgcctatcatgagtatttaaagatgccgatgcctaagtttggcccggatctcacgaaactcgacttgaaggacatgctgtattatcagaagatgaccgataaaaagttccgtgactggaaagaagtcccagctgacttgaagcggacgttcgaccggttaggtgtgcctgaagctgaacggaaatacttagccggttcatcggcgcagtatgaatctgaagtcgtttatcacaatatgcgtaaagattttgaaaagttaggtattatttttaccgataccgatacggcgcttcacgattatccagaactgttcaagaagtggtttgggaaactcgtcaaaccaaccgataacaagtttgcggctttaaacgcggcagtctggtcaggtgggtccttcatttatgtgcctaagggtgtccagacgaagacgccaattcagtcatatttccggttaaatgctgaaaactcgggtcagtttgagcggactttgattatcgtggaagatggtgccagtgtcgactatgtcgaagggtgtacggcccctaattattcttcagatagtttgcacgcggccgttgttgaagtcaatgttgagcccaacgcttactgccgttatacaacgattcaaaactggtctgacaatgtttatagcctggaaactaagcgagctgcagcggccgaaaatgccacgatggaatgggtcgatgggaatttaggttcgaaggttacgatgaagtacccaagcgtttatttgaatggggaaggtgcccgcgggaccatgttatcgatcgcggttgccagcaatggcatccaccaagattctggtgctcggatgattcataatgctaagaatacctccagttcgattgtttcgaagtccatcgctaagactggtggtgcgactgattaccgtggaaccgtgcgttttgccaagcattcagacggttccaaagcgcatgttgagtgtgatacgatcatcatggatgaccagtcgtcttccaacacgattccgtataatgaaatcgacagtgctaacgtcgcgatggaacacgaagctaaggtgtccaaaatctcagaagaacagctctactacttgatgagccgaggaatttcagaagctaaggcaaccgaaatgattatcatgggattcgtagaaccatttacgaagcaattaccgatggaatatgctgttgaattaaaccggttaatcagctttgagatggaaggttcaatcggg

SEQ ID NO: 608 - protein, 468 aa, Lactobacillus plantarum
MSEVPDVVKNDRDYEYGFHDDVKPAYSTGRGLTEATVREISAAKHEPQWMLDYRLNAYHEYLKMPMPKFGPDLTKLDLKDMLYYQKMTDKKFRDWKEVPADLKRTFDRLGVPEAERKYLAGSSAQYESEVVYHNMRKDFEKLGIIFTDTDTALHDYPELFKKWFGKLVKPTDNKFAALNAAVWSGGSFIYVPKGVQTKTPIQSYFRLNAENSGQFERTLIIVEDGASVDYVEGCTAPNYSSDSLHAAVVEVNVEPNAYCRYTTIQNWSDNVYSLETKRAAAAENATMEWVDGNLGSKVTMKYPSVYLNGEGARGTMLSIAVASNGIHQDSGARMIHNAKNTSSSIVSKSIAKTGGATDYRGTVRFAKHSDGSKAHVECDTIIMDDQSSSNTIPYNEIDSANVAMEHEAKVSKISEEQLYYLMSRGISEAKATEMIIMGFVEPFTKQLPMEYAVELNRLISFEMEGSIG

SEQ ID NO: 609 - DNA, 1410 bp, Lactococcus lactis
atgacagaaaatagtacacaagaagtcgtcaaagacctcgaagaatataaatttggatttcacgataatgcagaacttgaattcacaacaggtttaggtttgaccgaagaagttattcgcgaaatttctgaaacaaaaaatgaacctgagtggatgttagagtttcgtctgaaatcttttgaagcttttaaaaaattggacatgccaaaatggggcccagatctttctggtattgattttaatgatattgtttattatcaaaaaccatcagcaaaagctgcgcgttcttgggaagacgttcctcaagaaatcaaagacacttttgaaaaaattggtattccagaagctgaacgttcatatttggcaggagcttctgctcaatatgaatcagaagttgtttatcataatatgaaagatgaatttgaaaaattaggaattattttcactgacactgattcaggattacgtgactatccagaaattttcaaaaaatatttcagcaaactcgttccaccaacggataacaaattggcagccttaaattctgccgtttggtctggagggtcatttgtctatgttcctaaaggagtcaaatgtgagattccgattcaagcttatttccgtattaacaacgaaaaatcaggacagtttgaacggacattgattattgttgaagaaggggcatctattcagtacgttgaaggatgtactgcaccaacttactctgcaagttcacttcatgcagcagtggttgaaatctttgttgaagagggtggttatatgcgctactctactattcaaaactggtcagataacgtctataatctggttaccaagcgtgctgctgcagaaaaaaatgcgacggttgaatggattgacggaaacttagggtcaaaagtatccatgaaatacccagccgttcatttgaatggaccaggagcgcgtggaacaatgctctcaatcgcttttgctggagcaaaccaaaatcaagatacaggtgctaaaatgattcataacgcaccaaatacttcaagttcaatcatttctaagtctattgccaaaaatggtggagcagtcaattaccgtggacaagttacttttggaaaaaattctaaaaaatctgcttctcatattgaatgtgacacaattttaatggatgatttatcaaaatcagataccgtaccattcaatgaaattcataattcacaagtcgccttggaacacgaggcgaaagtgtcaaaaatttcagaagaacaactctattatttgatgagtcgtggacttacagaaaaagaagcaactgacatgattgtcatgggcttcattgaaccctttaccaaagaattgccaatggaatacgctgttgaattaaatcgcttgatttcttattcaatggagggttctattggg

SEQ ID NO: 610 - protein, 470 aa, Lactococcus lactis
MTENSTQEVVKDLEEYKFGFHDNAELEFTTGLGLTEEVIREISETKNEPEWMLEFRLKSFEAFKKLDMPKWGPDLSGIDFNDIVYYQKPSAKAARSWEDVPQEIKDTFEKIGIPEAERSYLAGASAQYESEVVYHNMKDEFEKLGIIFTDTDSGLRDYPEIFKKYFSKLVPPTDNKLAALNSAVWSGGSFVYVPKGVKCEIPIQAYFRINNEKSGQFERTLIIVEEGASIQYVEGCTAPTYSASSLHAAVVEIFVEEGGYMRYSTIQNWSDNVYNLVTKRAAAEKNATVEWIDGNLGSKVSMKYPAVHLNGPGARGTMLSIAFAGANQNQDTGAKMIHNAPNTSSSIISKSIAKNGGAVNYRGQVTFGKNSKKSASHIECDTILMDDLSKSDTVPFNEIHNSQVALEHEAKVSKISEEQLYYLMSRGLTEKEATDMIVMGFIEPFTKELPMEYAVELNRLISYSMEGSIG

SEQ ID NO: 611 - DNA, 1524 bp, Escherichia coli
atgtggctgtggcgaaagctttggggtataggcggtactatgtctcgtaatactgaagcaactgacgatgtcaaaacctggaccggcggcccgctgaattataaagaaggattcttcacccagttagccaccgatgagctggcaaaggggataaacgaagaggtggtgcgcgcaatttcggcgaagcgtaatgagccggagtggatgctggagtttcgtctaaacgcctatcgcgcatggctggagatggaagaaccgcactggttgaaagcgcactacgacaagctgaattatcaggattacagctactactcagcaccatcgtgcggtaattgtgacgacacttgcgcgtctgaacctggcgcggtgcagcaaactggcgcgaacgcctttttaagtaaagaggtggaggcggcgtttgagcagttgggcgttcccgtgcgggaaggcaaagaggtggcggtggatgccattttcgactcagtttcggttgccactacttatcgcgaaaaactggcggagcagggaattattttctgttcctttggtgaggcgatccacgatcacccggaactggtgcgtaaatatctcggcaccgtggtgccggggaatgacaacttctttgccgcgcttaatgcggcggtagcctctgatggtacgtttatttatgtgcctaaaggcgtgcgctgcccgatggaactttccacctattttcgcattaacgcagaaaaaaccgggcagtttgagcgcaccattctggtggccgacgaagacagctacgtcagctacattgaaggctgttccgctccggtgcgtgacagctatcagttacacgcggcagtggtggaagtcatcatccataaaaacgccgaggtgaaatattccacggtacaaaactggtttcctggcgataacaacaccggcggtattctcaacttcgtcaccaagcgtgctttgtgcgaaggcgaaaacagcaaaatgtcatggacgcaatcagaaaccgggtcagcgattacgtggaaatatcccagctgcattttgcgcggcgataactccattggtgagttttactcagtggcgctgaccagcggtcatcagcaagcggataccggcaccaagatgatccacatcggtaaaaacaccaaatcgaccattatctcgaaagggatctctgccggacatagtcagaacagttatcgcggcttagtgaaaatcatgccgacggcaaccaatgcgcgcaatttcactcagtgcgactcaatgctgattggcgctaattgtggggcgcataccttcccgtatgttgagtgtcgtaacaatagtgcgcaactggaacacgaggcaacgacatcacgtattggtgaagatcaactgttttactgcctgcaacgcgggatcagcgaagaagacgccatctcgatgattgttaacggtttctgcaaagacgtgttctcggagctgccgttggaatttgccgttgaagcacaaaaactcctcgccatcagtcttgaacacagcgtcgga

SEQ ID NO: 612 - protein, 508 aa, Escherichia coli
MWLWRKLWGIGGTMSRNTEATDDVKTWTGGPLNYKEGFFTQLATDELAKGINEEVVRAISAKRNEPEWMLEFRLNAYRAWLEMEEPHWLKAHYDKLNYQDYSYYSAPSCGNCDDTCASEPGAVQQTGANAFLSKEVEAAFEQLGVPVREGKEVAVDAIFDSVSVATTYREKLAEQGIIFCSFGEAIHDHPELVRKYLGTVVPGNDNFFAALNAAVASDGTFIYVPKGVRCPMELSTYFRINAEKTGQFERTILVADEDSYVSYIEGCSAPVRDSYQLHAAVVEVIIHKNAEVKYSTVQNWFPGDNNTGGILNFVTKRALCEGENSKMSWTQSETGSAITWKYPSCILRGDNSIGEFYSVALTSGHQQADTGTKMIHIGKNTKSTIISKGISAGHSQNSYRGLVKIMPTATNARNFTQCDSMLIGANCGAHTFPYVECRNNSAQLEHEATTSRIGEDQLFYCLQRGISEEDAISMIVNGFCKDVFSELPLEFAVEAQKLLAISLEHSVG

SEQ ID NO: 613 - DNA, 366 bp, Escherichia coli
atggacatgcattcaggaacctttaacccacaagatttcgcctggcaaggcttaacgctgacacccgcagcggcgatacacatccgtgagctggtggcaaagcagccgggtatggtcggcgtgcgcttaggcgtgaagcaaacgggctgcgcgggctttggctatgtgctcgacagtgttagcgagccggacaaagacgatctgctgtttgaacacgacggcgcgaagctgtttgtcccgctgcaagcgatgccgtttattgatggcacggaagtcgatttcgttcgtgaaggacttaatcagatattcaaatttcacaaccctaaagcccagaatgaatgtggctgtggcgaaagctttggggta

SEQ ID NO: 614 - protein, 122 aa, Escherichia coli
MDMHSGTFNPQDFAWQGLTLTPAAAIHIRELVAKQPGMVGVRLGVKQTGCAGFGYVLDSVSEPDKDDLLFEHDGAKLFVPLQAMPFIDGTEVDFVREGLNQIFKFHNPKAQNECGCGESFGV

SEQ ID NO: 615 - DNA, 414 bp, Escherichia coli
atggctttattgccggataaagaaaagttgctgcgtaattttttacgctgcgccaactgggaagagaaatatctctacattattgagctgggccagcgtctgccagaattacgcgacgaagacagaagtccacaaaatagcattcagggctgtcagagtcaggtgtggattgtcatgcgccagaatgcccagggaattattgaattacagggcgacagcgatgcggcgattgtgaaagggcttattgcggtcgtctttattctctacgatcagatgacgccgcaggatattgtcaatttcgatgtgcgtccgtggtttgaaaaaatggcgctcacccaacatctcaccccatctcgttcacaaggtctggaagcgatgattcgcgcaattcgcgccaaagccgctgcacttagc

SEQ ID NO: 616 - protein, 138 aa, Escherichia coli [sequence omitted]

SEQ ID NO: 617 - DNA, 479 bp, Lactococcus lactis
atgcttaattgggtcgcctccctcccactttggttggcaaccacatttttatttgttgttgttttctttagagctcaatgtactttttggttaggaaaattgagttatcatggaattttgaaaacgaagtggggcaaaaaacttgagaaaaattcagagacttccgctggaattttagccattcaaaaaatgggttggccaattattcctctgtcttttttaacagtcggttttcaaactgctgttcaatttggcgctggcctaacaaattggtcttggtataaatacacattggctgcgattccaggttacttagcttggggatttatctatgcctccggaggactaagcctatttcgttcactcgttcagggttcgattggcttactcattctatttatcatcatcattttagctgtggtaattgcagcaaacctcgtccttcgttatattcgtaaaaatggaataaaaacggatga

SEQ ID NO: 618 - protein, 65 aa, Lactococcus lactis
MLNWVASLPLWLATTFLFVVVFFRAQCTFWLGKLSYHGILKTKWGKKLEKNSETSAGILAIQKMG

SEQ ID NO: 619 - DNA, 465 bp, Lactobacillus plantarum
atgggactgtctaaattaagtggcttatatcgcgaagtgattttagatcatggtgatcatccgcatcataaaaatgcgttgccaaacgcaacacatgccattacgttgaaaaatccaacttgtggcgacgtcatcaatttggctattcaattggatgcgcatgatcaaatcgaagatattggatttacgggtgagggctgtaccatcagtcaagcatcggccagtatgatgacggatgcggtgatgggtaagtcgaaagaacaggcattggcaatggctaagacattttcggatatggcgattggcaagcaacacccgcaggccgatatggatgccttagaagacgccgcaattttatcgaatattatgcaatttccggcacgaatcaaatgtgccacgctagcttggtgggctttgcaacgggcattgcttgctgaaaatggcaatgaggaggaatcagaagta

SEQ ID NO: 620 - protein, 155 aa, Lactobacillus plantarum
MGLSKLSGLYREVILDHGDHPHHKNALPNATHAITLKNPTCGDVINLAIQLDAHDQIEDIGFTGEGCTISQASASMMTDAVMGKSKEQALAMAKTFSDMAIGKQHPQADMDALEDAAILSNIMQFPARIKCATLAWWALQRALLAENGNEEESEV

SEQ ID NO: 621 - DNA, 456 bp, Lactococcus lactis
gtggctttatctaaattagataatctatatcgtgcagtaattcttgaccactcatcaaatccacgtcatgctggagaattacagacaggatgtatggttgacctcaacaatccaacctgtggtgatgtgattcgcctgactgttgaatttgaaaatgatgtcatttcaaacattgcttttagtggccatggctgcacaatctcaacagcttcagcttcaatgatgaccgttgctgttcttggaaaaacaaaagaagaagcaaaagagctggcaactattttttcagcaatggtgaccggtgaaactgacgaacgacaagaaaaacttggagatgctcagtttcttgcaggggttagtaaatttccagctcgagtaaaatgctccactctggcttggaatgccctaaaaaaagccattgatgttggtgaagcacaagaaacagtaattcatggcgaa

SEQ ID NO: 622 - protein, 152 aa, Lactococcus lactis
VALSKLDNLYRAVILDHSSNPRHAGELQTGCMVDLNNPTCGDVIRLTVEFENDVISNIAFSGHGCTISTASASMMTVAVLGKTKEEAKELATIFSAMVTGETDERQEKLGDAQFLAGVSKFPARVKCSTLAWNALKKAIDVGEAQETVIHGE

SEQ ID NO: 623 - DNA, 1239 bp, Lactobacillus plantarum
atggcatccaattttgagacgttacggtcagattttcccattctaaaccaacaagtgaatgatgaacgacttgtctacctagataatgcggcgactgcgcagcgccccaaccaagtcgtggatgcgctcgttcacttttatcaacacgataacgccaatgttcatcgtggtgtccacaccttagcagagcgggccactagtcaatacgaagctgcgcgtgccaaggtgcaacggttcatcaatgctccaaaaacggatgaaatcgtcttcaccaaagggacgacggatagtctcaatctgattgccagtacttatggcgaagccaatattcaagcgggtgatgagatcgtcatttccgttatggagcatcatagtaatttaattccgtggcaacagttagcattgcgtaagcacgccaccttgaaatatattgagttaacggcgactggtgaattggacatggccgatgctgccaacaagattacggatcgaacaaaaatcgtttcagtgacccatgctagtaatgtattgggaacggtcaatccaatcaaggcgttagcacgattggcgcatcaacacggtgccgtgatgattgcggatggggcgcaagcagcccctcatatgccggtcgatgtccaggcactcgatgttgatttttacgcattttcggggcataaaatgctgggaccaaccggcattggcgttctatatggtcgtgagaatttattagctacgatgccaccgtatcaatttggtggtgagatgattggctttgttcaccgtgatgacagtacctgggcggaactaccgtggaagtttgaagcgggcactcagaacattgccggtgcgatcggcttgggcgcggcggttgattatttgacgcaactcggtatggatcaagttcagcaacacgaacagcaattagtcaattacttattgcctaagttgattgcaatgcctggtgtcacggtctacggtccccaagatccccaatatcatacgggcgtcatcgcctttaatatcgacggtttgcacccgcacgacgcggctaccgcgttggatatggaaggtgtcgccgttcgcgcgggtcatcactgtgcacaacccctgatggcagcgctcggcttagtagcaactgcacgggctagtttttacatttacaatacacaagcggacgctgatcaattattaacgtcactccaagcaacaaaggagtttttcgaacatgggactgtctaa

SEQ ID NO: 624 - protein, 412 aa, Lactobacillus plantarum
MASNFETLRSDFPILNQQVNDERLVYLDNAATAQRPNQVVDALVHFYQHDNANVHRGVHTLAERATSQYEAARAKVQRFINAPKTDEIVFTKGTTDSLNLIASTYGEANIQAGDEIVISVMEHHSNLIPWQQLALRKHATLKYIELTATGELDMADAANKITDRTKIVSVTHASNVLGTVNPIKALARLAHQHGAVMIADGAQAAPHMPVDVQALDVDFYAFSGHKMLGPTGIGVLYGRENLLATMPPYQFGGEMIGFVHRDDSTWAELPWKFEAGTQNIAGAIGLGAAVDYLTQLGMDQVQQHEQQLVNYLLPKLIAMPGVTVYGPQDPQYHTGVIAFNIDGLHPHDAATALDMEGVAVRAGHHCAQPLMAALGLVATARASFYIYNTQADADQLLTSLQATKEFFEHGTV

SEQ ID NO: 625 - DNA, 1239 bp, Lactobacillus reuteri
atggacaacaatacgaataattatttagctgattttccggcgcttaatcagcgagttaatgatgaacgcttagcctaccttgataatgctgcgaccgttcagcgtccgcgtcaggtaattcaggcacttgttaatttttataatcaagataatgcaaatgttcatcgaggggttcatactctagcagaacgtgccactaaggattatgaagaagcgcgaaaaaaagtgcaaaagtttattaacgcgtcgagtgctaatgagattatctttacaaaggggtgtacggatgggttgaatctcgtcgctgcaacctatggcgaacaaaatattcagcctggtgatgagattgtcatttcaattatggaacaccatagtaaccttattccttggcaacaattagctaagaaaaagggtgctaccctgaagtatattgaattaactccagatggcgaacttgatcttgcagatgctaaaaagaaaattaccgataagacaaagattgtggcagtagctcatgccagtaatgtattaggaacagtgacgcccttgaaagaattagcaacgattgcgcaccaacatggggcaatcgttgtcggtgatggagcgcaagcggttccccatatgccagtcgatgtacaagatcttgatgttgacttttacgctttttctggtcataagatgatgagtccaatgggaattggggttttgtacggaaaagagaacttattacgagcgatgcctccttaccaatatggtggggaaatgattaacgatgttcaccgtgatgagagtacatgggctgatatcccgtttaagtttgaagcgggaacccaaaatattgccggggcagttggtcttggagccgcgattgattatttaaatggtattggaatggataggattgtgcaaaaagaacaggaacttgttaattatgttttacccaagttaattgccattccagatgtcgaagtttacggtccgcaatcgccagcaaaacatacgggggtaattgcctttaacatcaaaggccttcatccccatgatgttgctacggcccttgatatggatggagtagcagttcgcgctggtcaccactgtgcgcaaccgctcatggaagacttaggagtaacgacaaccgcgcgtgccagtttctatttttacaatactaaagaagatgctgatcaattaattaacgcaatcaaggaaacaaaggagttctttaacattgggactatctaa

SEQ ID NO: 626 - protein, 412 aa, Lactobacillus reuteri
MDNNTNNYLADFPALNQRVNDERLAYLDNAATVQRPRQVIQALVNFYNQDNANVHRGVHTLAERATKDYEEARKKVQKFINASSANEIIFTKGCTDGLNLVAATYGEQNIQPGDEIVISIMEHHSNLIPWQQLAKKKGATLKYIELTPDGELDLADAKKKITDKTKIVAVAHASNVLGTVTPLKELATIAHQHGAIVVGDGAQAVPHMPVDVQDLDVDFYAFSGHKMMSPMGIGVLYGKENLLRAMPPYQYGGEMINDVHRDESTWADIPFKFEAGTQNIAGAVGLGAAIDYLNGIGMDRIVQKEQELVNYVLPKLIAIPDVEVYGPQSPAKHTGVIAFNIKGLHPHDVATALDMDGVAVRAGHHCAQPLMEDLGVTTTARASFYFYNTKEDADQLINAIKETKEFFNIGTI

SEQ ID NO: 627 - DNA, 1239 bp, Lactobacillus fermentum
atggacaaaagtattagtgaccttcgcgccgactttccgattttggaccagcgggttaacgatgagcctctggtgtacctcgataacgccgctacggcccagcgccccaccccggttcttaagcaggtactcgacttttaccaaaccgataacgccaacgtgcaccgcggggtccacaccctagcggaacgggcaaccgccgattacgaagcggcccgcgatagggtgcagaagttcattcacgcaaagaagcgagaagaagtgatctttaccaaggggtgcaccgattccttaaacctggtcgccgccacttacggcgagcaaaacatccaggccggcgatgaaattgtcatctcaattatggaacaccactccaatttgattccgtggcaacagctagcgcttaaaaagggcgccacccttaagtacatcggtttaacgaaggagggcgaattggatctggcagatgcggcggctaagattaccgaccgtaccaagatcgtcgccgttactcacgcttccaacgtgatgggaacggtgacgcccttaaaacaattggccaagttggcccaccaacacggggcgattatcgtcggcgacggggcccaagcggttccccacatgaaggttgacgtaaccgaattggacgtggacttttacgctttttccggccataagatgatgtcgcccaccggaatcggggtcttgtatggcaaacaagccctgttggaggccatacccccttatcagtacggcggcgaaatgattggcacggtaaccgaacaggcaagtacctgggcggccctgccgtacaagtttgaggccgggacccaaaacatcgccggggccgttggcttaggggcggcgatcgattacttgacggcgattggaatggaccaggttgaagcccacgaacgggtgctggtgcaaacggtcttgcctcaattactcgcaattgaggggctaacggtttacggaccgaccgacccggctaagcacaccggggtgatctcctttaacctcggccacctgcacccccacgacctggcgacggcgctagacatggaaggggtcgccgtgcgggcgggtcaccactgcgcacaaccattgatgaattaccttggtctggaggccagcgcccgggccagcttttacctgtataacaccgcggctgacgctgagaagttggtgtcagcactaaaggaagcaaaggagttcttcagaattgggactatctaa

SEQ ID NO: 628 - protein, 412 aa, Lactobacillus fermentum
MDKSISDLRADFPILDQRVNDEPLVYLDNAATAQRPTPVLKQVLDFYQTDNANVHRGVHTLAERATADYEAARDRVQKFIHAKKREEVIFTKGCTDSLNLVAATYGEQNIQAGDEIVISIMEHHSNLIPWQQLALKKGATLKYIGLTKEGELDLADAAAKITDRTKIVAVTHASNVMGTVTPLKQLAKLAHQHGAIIVGDGAQAVPHMKVDVTELDVDFYAFSGHKMMSPTGIGVLYGKQALLEAIPPYQYGGEMIGTVTEQASTWAALPYKFEAGTQNIAGAVGLGAAIDYLTAIGMDQVEAHERVLVQTVLPQLLAIEGLTVYGPTDPAKHTGVISFNLGHLHPHDLATALDMEGVAVRAGHHCAQPLMNYLGLEASARASFYLYNTAADAEKLVSALKEAKEFFRIGTI

SEQ ID NO: 629 - DNA, 1236 bp, Enterococcus faecalis
atgatggatgcagcaaccattcgtcaatcgtttcctattttatttcaagaagttaatgatgaaccgctagtttatttagacaatgctgcgacaacccaaaaaccaacggcagtgttagatgttttacgacattattatgaaaccgataatgccaatgttcatcgtggggtgcacacgttagccgaacgagcaacgaaggactatgaagcctcccgcgaaaaggttcgccaatttatccatgccaaagaaacagcagaagttttatttacacgaggaacaacaaccagtttgaattggattgccaaaagttatggtgacttggcagttacagccggggatgaaatcgtcatatcttacatggaacatcattcaaacattattccctggcaacaattagctcaacgtacaggggccattttgaagtatatagacgtcactgaagacggctttttagatatggcaagtgcacgtcaacaaattacagaaaaaacgaaaattgtttcgattgctcatgtttcaaatgtgttaggggtcattaatccaatcgaagaattaacacaattagctcatcaaaatggcgctgtgatggtggtagacggcgcgcaagcagttcctcatatgcctgtggacgttcaagccatcgatgctgatttttatgcatttagtggtcacaaaatgtgtggaccaactggaattggtgtcctttatggcaaacgtcatttattggaacaaatggaacctgtggaatttggtggcgaaatgattgactttgttcatcttcaagaaagtacttggaaagagcttccttggaaatttgaagctggcacacctaatattgccggggcaattgccttaggtgccgccattgattatttaacagaaattggtttagaggccattcatcaacatgaagcagcccttgttcactatgttttgccgaagttgcaagctatcgagggcttgacgatttatggtccacaggatccaaaagaccacacaggtgtgattgcttttaatattgaaggtttacatccacatgatgtggctacggcgttagatatggaaggggtcgctgtcagagcgggtcaccattgcgcgcaaccgttattaaactatttgagcgtgccagcaaccgcacgggcaagtttttatttatacaataccaaagaagacgcagatcgcttagttgaagcgattaaagcgacaaaggagtttttccagcatggcactttctaa

SEQ ID NO: 630 - protein, 411 aa, Enterococcus faecalis
MMDAATIRQSFPILFQEVNDEPLVYLDNAATTQKPTAVLDVLRHYYETDNANVHRGVHTLAERATKDYEASREKVRQFIHAKETAEVLFTRGTTTSLNWIAKSYGDLAVTAGDEIVISYMEHHSNIIPWQQLAQRTGAILKYIDVTEDGFLDMASARQQITEKTKIVSIAHVSNVLGVINPIEELTQLAHQNGAVMVVDGAQAVPHMPVDVQAIDADFYAFSGHKMCGPTGIGVLYGKRHLLEQMEPVEFGGEMIDFVHLQESTWKELPWKFEAGTPNIAGAIALGAAIDYLTEIGLEAIHQHEAALVHYVLPKLQAIEGLTIYGPQDPKDHTGVIAFNIEGLHPHDVATALDMEGVAVRAGHHCAQPLLNYLSVPATARASFYLYNTKEDADRLVEAIKATKEFFQHGTF

SEQ ID NO: 631 - DNA, 1236 bp, Enterococcus faecium
atgatcgatgctaaaaagctacgcaatgattttcctatcttatttcaagacgtcaatgatgaacctttagtttatctggataatgcagcgacgacccaaaagccaaaacaagtactccaggcattagcgtactattacgaacacgataacgccaatgttcatcgcggtgtccatacgttagcagaacgcgcgacccatgattatgaacaagcaagagaaaaagtacgggcgttcatccatgcaaaagaaacagcagaagtgctgtttactcgtggtacgacgacaagcttgaattgggtagccagaaccttcggcgaccgctatatcaaagcaggagacgagatagtgctctcttacatggaacatcattctaatgttatcccgtggcagcagttggcaaaacgaacaggtgctgtcttgaaatatatcgaactaacagaagaaggcttcctggatatggaggatgcagcgaaaaagattacggacaaaaccaaaatcgtctccattgctcatgtatccaatgtcttaggtgtcttcaatcctgttcaagaattagctgaacttgtccatgaaaacggcggggtcatcgtagtagatggtgctcaatctgccccgcacatggccattgatgtccaagcactagactgtgatttctttgctttcagcggacacaaaatgtgcggaccaacaggtattggtgttttatatggtaaacgaaaatggttagaagaaatggaacctgttgaatttggtggcgaaatgatcgattttgtcgaattatacgacagtacatggaaagaactaccttggaaattcgaagcagggacaccaaatatcgccggcgctatcgcattaggccatgcaatcgattatttgcaaaaactcggtatggacaatatccatcgatatgaagaagaactagccgcttatgtgttgccaaaattacaagcaattgatggattgactgtttatggtccacaagacccgaattttcggacaggagtcgttgcattcaatttggatgggttacatccccatgatgtcgcgacagctttagacatggaaggggtagccgtcagagcaggtcatcattgtgcgcaaccgctattgaagtaccttgaagtatcagcgactgctcgcgcgagcttttatttctacaacacaacgcaagacgccgaccgtttagttgaagcaatcatggcaacaaaggagtttttccaacatgggactatctaa

SEQ ID NO: 632 - protein, 411 aa, Enterococcus faecium
MIDAKKLRNDFPILFQDVNDEPLVYLDNAATTQKPKQVLQALAYYYEHDNANVHRGVHTLAERATHDYEQAREKVRAFIHAKETAEVLFTRGTTTSLNWVARTFGDRYIKAGDEIVLSYMEHHSNVIPWQQLAKRTGAVLKYIELTEEGFLDMEDAAKKITDKTKIVSIAHVSNVLGVFNPVQELAELVHENGGVIVVDGAQSAPHMAIDVQALDCDFFAFSGHKMCGPTGIGVLYGKRKWLEEMEPVEFGGEMIDFVELYDSTWKELPWKFEAGTPNIAGAIALGHAIDYLQKLGMDNIHRYEEELAAYVLPKLQAIDGLTVYGPQDPNFRTGVVAFNLDGLHPHDVATALDMEGVAVRAGHHCAQPLLKYLEVSATARASFYFYNTTQDADRLVEAIMATKEFFQHGTI

SEQ ID NO: 633 - DNA, 1239 bp, Lactobacillus sakei
atgggcaaaagtctgaacactagtcggcaagattttccaattttagaacaattggttaatgatgaacccttggtttatttggataacgcagcgacaacgcaaaagccacaagcggtgattgaccaaatagtgagttactaccaacatgacaatgccaatgttcaccggggcgtgcatacgttggcggaacgggcgactgcgcaatacgaagctgctagagttaaagttcaacaatttatcaatgccgcttcttcagcggagattgtcttcacaaaagggaccacgcagagtttaaactggattgccggtagttttgggccaacagttgtccaagctggcgatgaaatcgtcatcagctatatggaacaccatagcaacctagtcccttggcaacaacttgctaaaaagacgggggccaaactacgctacatcgatctattgccagatggtcagttagatttagacgctgctaagcaggtcattggtccacggactaaaatcgtcagtttagcgcatgcttctaacgttttaggcgttgtcaatccagtgaagacgattgcggcactagtccacgtacaaggtggctatatggtcgttgatggcgcacaagctgtcccacatatgccagttgatgtgcaggcgctcgatgcagatttttatgccttttcagggcataaaatgttggggccaacaggaattggtgtcttgtatggtaagcaggccttactcgaacaattatcacctgttgaatacggtggtgagatgatcgattttgttggcttacaagaatcgaccttcaaagaactgccttggcgcttagaaggtggaacccccaatattgctggcgcgattggattaggagctgcgattgattatctgaatcagattgggatgaccaacatccaggcacatgagcaggctttagtcgccgaggcattaccggccttacaagcgattgacgggttgacgatttatggcccgcaagaagctagtcagcgaaccggtgtgattgcttttaatctcgataatctccatccgcacgatttagcaacagccctcgatatggaaggggtcgctgttcgcgctgggcatcattgcgcacaaccactgatgcagtggctaaacgttgcggcaacggctcgcgcgagtttctacctctacaatacgtcagaagacgtacaagccttagtggccgcgattcaagcagcaaaggagtttttccaaaatggcactctctaa

SEQ ID NO: 634 - protein, 412 aa, Lactobacillus sakei
MGKSLNTSRQDFPILEQLVNDEPLVYLDNAATTQKPQAVIDQIVSYYQHDNANVHRGVHTLAERATAQYEAARVKVQQFINAASSAEIVFTKGTTQSLNWIAGSFGPTVVQAGDEIVISYMEHHSNLVPWQQLAKKTGAKLRYIDLLPDGQLDLDAAKQVIGPRTKIVSLAHASNVLGVVNPVKTIAALVHVQGGYMVVDGAQAVPHMPVDVQALDADFYAFSGHKMLGPTGIGVLYGKQALLEQLSPVEYGGEMIDFVGLQESTFKELPWRLEGGTPNIAGAIGLGAAIDYLNQIGMTNIQAHEQALVAEALPALQAIDGLTIYGPQEASQRTGVIAFNLDNLHPHDLATALDMEGVAVRAGHHCAQPLMQWLNVAATARASFYLYNTSEDVQALVAAIQAAKEFFQNGTL

SEQ ID NO: 635 - DNA, 1239 bp, Carnobacterium sp.
atgagtttttcagccgaacaagtgaaaaatgattttccaattctaactcaaattatcaacgatgaaccgttagtctatttagataatgcggcgaccactcaaaaaccaacagccgtattggctgctcttgaaacgtattaccgtgaagccaatgccaacgtccatcgcggtgtgcacaccttagctgaacgagctacaacaggttacgaagcagcgcgtgaaaaagtacggcactttatcaatgccaatgaatcagcagaagtcctatttacccgcggcaccacgaccagtttgaactgggtagctaaaagctacggtgaagcaaatgtgcaacaaggagatgagatcctgatttcagtgatggaacatcactctaatttgattccttggcagcagttagctaagaaaaccggtgctgcattaaagtatatcgagctgacagaagaaggcatgttggacatggagagtttccacgctcaattaagcgagaagactaaaatcgtagcgttggcgcacgtctccaatgtacttggggtcgttaacccgattcaagacattgcacgactggcccatgcaagaggagccgtattagtggtcgatggagcgcaagctgttccgcatatgccggtggatgtccaagagttggaagctgatttttatgctttcagtggacataagatggtcggaccgactggcattggcgtgctgtacgggaaacgtaccttattagaacaaatggaccccgttgaatttggtggggaaatgattgctgtggtggatgaacaagacagtacgtggaaagaattgccttggaagtttgaagccggcacccctaatattgccggagccattggactaggtgcagccattgattatttatcaacgattggcttgtcaacgattcaagaacacgaaaaaagcttgatggcttacttatggccaaaattaatagcgattccaggattaatagtctatggaccaaaggatatagcaaaacgaaccggtattgtaacgttcaacctagatgggcttcatccacatgatgtggcaaccgctatggatatggaaggggtagcgattcgagctggccatcattgtgctcaacccttgatgcgcagattatcagccgattcaaccgctcgagcgagtttttatctgtacaatacgacagcagatgtggataaatttattgaagcattgctggcgacaaaggagttttttgctcatggccttaactaa

SEQ ID NO: 636 - protein, 412 aa, Carnobacterium sp.
MSFSAEQVKNDFPILTQIINDEPLVYLDNAATTQKPTAVLAALETYYREANANVHRGVHTLAERATTGYEAAREKVRHFINANESAEVLFTRGTTTSLNWVAKSYGEANVQQGDEILISVMEHHSNLIPWQQLAKKTGAALKYIELTEEGMLDMESFHAQLSEKTKIVALAHVSNVLGVVNPIQDIARLAHARGAVLVVDGAQAVPHMPVDVQELEADFYAFSGHKMVGPTGIGVLYGKRTLLEQMDPVEFGGEMIAVVDEQDSTWKELPWKFEAGTPNIAGAIGLGAAIDYLSTIGLSTIQEHEKSLMAYLWPKLIAIPGLIVYGPKDIAKRTGIVTFNLDGLHPHDVATAMDMEGVAIRAGHHCAQPLMRRLSADSTARASFYLYNTTADVDKFIEALLATKEFFAHGLN

SEQ ID NO: 637 - DNA, 1230 bp, Streptococcus mutans
atgacattagatactcaaaagatgaaacaggatttccccattttaaaacaaattgtcaatgatgaacctttggtgtatcttgacaatgcagctacaactcaaaagccaaaacaggttttagcttgtttgaatgattactatagacaggataatgctaatgtccatcgtggcgtccatagcttggctgaaagagcaacagctgcttacgaagctgctcgtgaaaaagtccgtcgttttatcaatgctgactcaactaaagaaattctttttacgaggggggcaacaacaggtttgaattgggctgctcgttttgctgaggaagtgttacaagcagatgacgaagttcttatttctgtcatggaacatcattctaatatcgttccatggcaggaagcttgccggaaaacgggtgctaagttagtttatgcttatttaaaagatgggcagcttgatttagaagatcttaaaaataaagtttctgctaaaacaagatttattagtttaacccatatttctaatgtgctaggctgtatcaatcctatcaaggaaattgcacagctggctcatcagcacaatgcctacatggttgttgatggggcacaatcggcacctcatatgactattgatgttcaagacttagactgtgatttctttgctttttcaggtcataagatgctaggacctactggtattggtgttctttatggtaaagaagacattcttaagcaaatgagtcctgttgaatttggcggtgaaatgattgattttgtctatgaacaaaagaccacttggaaggacttgccttggaagtttgaagcaggaacaccaaatattgcaggagccattgctcttggtgcagcacttgattatttagcagaattgggaatggaacaggtacaggctcatgagcaagaattagtggcttatgttttgcctaagttgcaagctattaaagggttgacagtctatggacctgagaatcctgcaaagcataccggggtcatttcctttaatctggagggtcttcatcctcatgatgtagcaacagcacttgattatgaaggtgttgctgttcgtgcaggacatcattgtgcacagccactgatcaattatttaggtcttcattcagcagcacgtgcaagtttttatatttataatacaaaagaagactgtgacaaattaatagaagcgattcttaaaacaaaggagttctttaatggcactctctag

SEQ ID NO: 638 - protein, 409 aa, Streptococcus mutans
MTLDTQKMKQDFPILKQIVNDEPLVYLDNAATTQKPKQVLACLNDYYRQDNANVHRGVHSLAERATAAYEAAREKVRRFINADSTKEILFTRGATTGLNWAARFAEEVLQADDEVLISVMEHHSNIVPWQEACRKTGAKLVYAYLKDGQLDLEDLKNKVSAKTRFISLTHISNVLGCINPIKEIAQLAHQHNAYMVVDGAQSAPHMTIDVQDLDCDFFAFSGHKMLGPTGIGVLYGKEDILKQMSPVEFGGEMIDFVYEQKTTWKDLPWKFEAGTPNIAGAIALGAALDYLAELGMEQVQAHEQELVAYVLPKLQAIKGLTVYGPENPAKHTGVISFNLEGLHPHDVATALDYEGVAVRAGHHCAQPLINYLGLHSAARASFYIYNTKEDCDKLIEAILKTKEFFNGTL

SEQ ID NO: 639 - DNA, 1224 bp, Streptococcus suis
atggatttggaacgcattcgcaaggaattttcaatcctagaccaagttgttaacgatgagccgctggtctatttggacaatgcggcgaccactcaaaaaccgcagcaggtactagatgtgctggcggattattaccagaaggacaatgccaatgtccaccgtggcgttcacaccctttcggaacgggcaactactcgctacgaggcggctaggcagaaggtggcagattttattcaggccaagtctagcaaggaaattctctttaccagaggaacgaccactagtcttaactgggtggctcagtttgcaaaggaaattctccagccagaccaggaagtgatcatctcggtccaagagcaccactccaatatcatcccttggcagcaagcctgtcagcaaacgggtgctaagctccgctatgtgaccctaaaagacggcgagctagacatggaccatctgcggtcgctactatcttctaagaccaagttcgtctccctggcccacgtatccaatgtcctaggtggcgtggttcctattggggaaatagcagagctggtgcatcaagtcggtgcctacttggtggtggacggagcccagtcagttccccacatgggcgtcaacgtgcaagaattagacgtggatttctatgccttttcaggtcataaaatgttgggaccgacaggaattggcattctctacggcaaggaagaattgctcaatctcatgtcgccagttgaattcggcggtgaaatgattgactttgtctatgagcagtcagctacttggaaggaattgccttggaagtttgaggcaggaacgcccaatattgcaggtgcgattggtctgggagcggccattgattacctgaccgaaattggtatggacgctatccaggcccacgaggcagaactggttgactatgtctttccaaaattgcaggctattccaggcttgaccatttatggcagtcaggacctgtccaagcggacgggagttattgcctttaacttggacgacttgcatccacacgatgtggcaactgctctggactatgaaggtgttgctgtgcgggcaggccaccattgtgcccaaccgcttctcagatatttgcaggtgcctgctactgtacgagcaagtttttacatttacaataccaaggctgactgtgataagttggtcgaggcaatcatcaagacaaaggagtttttcaatggccctatctag

SEQ ID NO: 640 - protein, 407 aa, Streptococcus suis
MDLERIRKEFSILDQVVNDEPLVYLDNAATTQKPQQVLDVLADYYQKDNANVHRGVHTLSERATTRYEAARQKVADFIQAKSSKEILFTRGTTTSLNWVAQFAKEILQPDQEVIISVQEHHSNIIPWQQACQQTGAKLRYVTLKDGELDMDHLRSLLSSKTKFVSLAHVSNVLGGVVPIGEIAELVHQVGAYLVVDGAQSVPHMGVNVQELDVDFYAFSGHKMLGPTGIGILYGKEELLNLMSPVEFGGEMIDFVYEQSATWKELPWKFEAGTPNIAGAIGLGAAIDYLTEIGMDAIQAHEAELVDYVFPKLQAIPGLTIYGSQDLSKRTGVIAFNLDDLHPHDVATALDYEGVAVRAGHHCAQPLLRYLQVPATVRASFYIYNTKADCDKLVEAIIKTKEFFNGPI

SEQ ID NO: 641 - DNA, 1233 bp, Streptococcus sanguinis
atgtctggatttaatgcagaagcaatcaagcaagattttcccattttggaccaaattgttaatgatgagcctttggtttatttggacaatgcggcgacaactcagaaacccaagcaggtgctgacggctatcgaagactactattttagagacaatgccaatgtccaccgcggtgtgcatacgctagctgagcgggcgacagcagcttatgaagcagccagggaaagagttcgttcttttatcaatgcggcttctagcagagaggttctctttacacgaggaaccacgacgagtctcaattgggtggctcagtttgcagctgaaaggctgcagcctggtgatgaagtgatgatttctatcatggagcaccattccaatgtcattccctggcaggaggcttgtaggaagaccggagccaagttagtctatgtctatctcaaggatggtgctctggatatggaggatttccgtgccaagctcaatgagcggaccaagttggtctctctggctcatgcttctaatgtcctcggtgtcatcaatcccatcaaggagattgcccagctggttcatcagcaaggagcatttttggtggtggacggggctcaatccattccgcacatgaggattgatgtgcaggatttggatgtagacttcttcgccttttcggggcataagatggcaggcccgactggtatcggggttctctatggcaaggaagagctgctagagcagatgtcgccagtcgagttcggcggcgaaatgattgattttgtctatgagcaggaagcgacctggaaggagcttccgtggaagtttgaggccggcactccaaatatggcaggagcaatcggtcttgcggcggccattgaatatttggaagaattgggcatggatgccattgctcagcatgagcaggacctgattgcctatgtatttcctaagttgcaggctgtggaaggcttgaccatttatggctctcaggatttggcccagcgttcgggcgtgattgcctttaacctggatggtctccatccgcatgatgtcgcgacagctctggactacgaaggagtggctgttcgggcgggtcaccattgtgcccagcctttgctcacctatctacaggtgccagcgactgtgcgtgctagcttttatatctataatacctatgcagattgtgacaagctggtagatgctttagaaaagacaaaggagtttttcaatggcgctttctaa

SEQ ID NO: 642 - protein, 410 aa, Streptococcus sanguinis
MSGFNAEAIKQDFPILDQIVNDEPLVYLDNAATTQKPKQVLTAIEDYYFRDNANVHRGVHTLAERATAAYEAARERVRSFINAASSREVLFTRGTTTSLNWVAQFAAERLQPGDEVMISIMEHHSNVIPWQEACRKTGAKLVYVYLKDGALDMEDFRAKLNERTKLVSLAHASNVLGVINPIKEIAQLVHQQGAFLVVDGAQSIPHMRIDVQDLDVDFFAFSGHKMAGPTGIGVLYGKEELLEQMSPVEFGGEMIDFVYEQEATWKELPWKFEAGTPNMAGAIGLAAAIEYLEELGMDAIAQHEQDLIAYVFPKLQAVEGLTIYGSQDLAQRSGVIAFNLDGLHPHDVATALDYEGVAVRAGHHCAQPLLTYLQVPATVRASFYIYNTYADCDKLVDALEKTKEFFNGAF

SEQ ID NO: 643 - DNA, 1227 bp, Leuconostoc mesenteroides
atgaagacgattagacatgattttccaatactaaatcaaacagtcaatgggcaagagctgctctattttgatagtgcggctacgtcacaaaaaccccagtatgtgattgattcattagtgaattattatcaaaataataatgcaaacgtgcatcgtggtatttatgagctatcagagcgtgcgacacaacaatatgaacaagcccgcgataaagtacaaaaattcattcatgctcaaaaacgtgaagaagttctattcactcgtggcacaactgagtcgcttaattggttggcaagtacttatggtgcagaaaatgttaaacaaggagatgaaatcctaatatcttacatggaacatcattctaatattgtgccgtggcaacaattagcgcaacgtgttggggctcatttaaaatatgtcgaactcaatgacgatggcaccttaaatatggctgatcttgaacggaaaataacagacaaaactaaaattgtatcaatcacacatgcttctaatgtgttgggggttgttaatcccataaaaaaaatcgcaaaaatagcccacaaacatgatgctatcatgattgctgatggcgcccaatctgttccgcatatgcgtgttgatgtgcaagatatggatgttgatttttttgctttttcgggtcataaaatgcttggaccaacaggtataggagttctttacggcaaacatgatattttagaaaatatgaaacctgctcaatttggtggagaaatgattgaattggtagacttgcaagaagcgacctttcagccttcaccatggcgttttgaggcgggaacgcccaatattgctggtgcaattgctttaggatccgctattgattatctgacaaatatcggaatgaaagaggtcgaaaactatgagcagtctctagttgattatgccttgccaaagctaaaaagtattgcgggtgtcaccatttatggtccgcaaaacagtgaacagcattcaggcgtgattgcatttaatttagcaggggtccatgcccacgacctagccacggccttggatcaagaaggaattgaggttcgtgcaggacatcattgtgcgcagccgctgatgaaatatttgaatattgcagcgacagttcgtattagtttgtatatctataatacgcgtgaagaaatcgatcgatttattagtgtcattgaagatattaaggagtattttaaccgtgagtttgcataa

SEQ ID NO: 644 - protein, 408 aa, Leuconostoc mesenteroides
MKTIRHDFPILNQTVNGQELLYFDSAATSQKPQYVIDSLVNYYQNNNANVHRGIYELSERATQQYEQARDKVQKFIHAQKREEVLFTRGTTESLNWLASTYGAENVKQGDEILISYMEHHSNIVPWQQLAQRVGAHLKYVELNDDGTLNMADLERKITDKTKIVSITHASNVLGVVNPIKKIAKIAHKHDAIMIADGAQSVPHMRVDVQDMDVDFFAFSGHKMLGPTGIGVLYGKHDILENMKPAQFGGEMIELVDLQEATFQPSPWRFEAGTPNIAGAIALGSAIDYLTNIGMKEVENYEQSLVDYALPKLKSIAGVTIYGPQNSEQHSGVIAFNLAGVHAHDLATALDQEGIEVRAGHHCAQPLMKYLNIAATVRISLYIYNTREEIDRFISVIEDIKEYFNREFA

SEQ ID NO: 645 - DNA, 1233 bp, Streptococcus thermophilus
atgtcagctctagatgcctataagattcgacaagattttgccatcttagatcaggtagtcaatgatgaacctttggtatacttggataatgcagcgacgactcagaaacctcaagtagttttggacaccctcatggcctactatcgtgaggagaatgctaatgtgcaccgtggcgtgcacactttggcagagcgtgccacagctgcttacgaagctagtcgtgaaaaaattcgccagtttattagtgccaaatcaactaaagagattctctttacacgtggaacgacaactggtcttaactgggttggtcgttttgcagagcaggttcttgagccaggagatgaggtggttatttcaattatggaacaccactctaatatcatcccttggcaggaagcttgtaagaaggcgggggctaaacttgtttatgcctacttgaaagatggtcagttggatatggaagacttggccaataagattagtgaaaagacaaaatttgtcagtctggctcaggtttctaacgttttaggttgcatcaatcctgttaaagagattgcacaaatggcccaccgagttggcgcctatatggtagtggatggtgcccaatctgcaccccacatggctattgatgttcaggatttggattgtgatttctttatcctttctggacataagatgttaggcccaacagggattggggttctctatggaaaagaagagattctcaaccagatgaatcctatcgaatttggtggtgagatgattgatttcgtttatgaacaagaagccacttggaaggaactgccttggaaatttgaggctggtacacctaacattgcgggagctattgcactaggtactgctgtggactacctctctgctttaggtatggaaaatgttcatgcttatgagcaagagttggtagactatgtcttgcctaagcttcaagcgattgagggattgacggtatatgggccagaagattctggcaaacatgcgggtgttatcgcctttaatattaatggacttcatcctcatgatgtggcgactgcccttgactatgaaggggtggcggttcgtgcgggtcaccactgtgctcaacctttaattaatcatttaggtatttcatcggctgcccgtgcaagtttctacatttacaataccaaagaggattgtgacaagcttgtagaggcaattcttgcgacgaaggagtttttcaatggcactctctag

SEQ ID NO: 646 - protein, 410 aa, Streptococcus thermophilus
MSALDAYKIRQDFAILDQVVNDEPLVYLDNAATTQKPQVVLDTLMAYYREENANVHRGVHTLAERATAAYEASREKIRQFISAKSTKEILFTRGTTTGLNWVGRFAEQVLEPGDEVVISIMEHHSNIIPWQEACKKAGAKLVYAYLKDGQLDMEDLANKISEKTKFVSLAQVSNVLGCINPVKEIAQMAHRVGAYMVVDGAQSAPHMAIDVQDLDCDFFILSGHKMLGPTGIGVLYGKEEILNQMNPIEFGGEMIDFVYEQEATWKELPWKFEAGTPNIAGAIALGTAVDYLSALGMENVHAYEQELVDYVLPKLQAIEGLTVYGPEDSGKHAGVIAFNINGLHPHDVATALDYEGVAVRAGHHCAQPLINHLGISSAARASFYIYNTKEDCDKLVEAILATKEFFNGTL

SEQ ID NO: 647 - DNA, 1218 bp, Lactococcus lactis
atgcttgaaggcatcaaaaatgaatttccagttctgaatcaaattgttaatgatgaacctttggtttatttggataatgcagcaaccactcaaaaacctttgagcgttttttcagcgataaaggattattatgaaaatgataacgccaatgtccatcgtggtgttcatacgttagcagagcgagcgactgaaaaatatgaagcagcgcgtgaaaaagtccgtgcctttatcaatgctaaatcaacaaaagaagtcttatttaccagaggaacaaccacctcaattaattgggtggctcaatttgctggacaaatcttgaaagcagatgatgagattgtcatttccattatggaacatcattctaacatcgttccttggcaagaagtagctaagaaaacaggggcaatcttaaaatttgtttatctcaaagagggcgaattggatatggaagatttgcgtcaaaaagtcacagcgcaaacgaaattcgtgtcaattgctcatgtctctaatgtcttagggacgattaatccgatagaggaaatttcaaaaattgctcatgaacagggtgcctatctggtcgttgatggcgcgcaatctacgccacatatggcgcttgaccttcaaaaaatggatgtcgatttctttgctttttcaggtcataaaatgatgggacccacaggaatcggtgttctttatggcaaagaagaattacttaatcaatttgaacccgtagaatttggcggggaaatgattgattttgtttataaaagtcattcaacctggacagaacttccttggaaatttgaagcaggaacaccaaatattgcgggtgctattgctttaggagcagctattgattatattcaagagcttggaattgaccaaattcatcaacatgaagccgaattgatagattatgtgatgccaaaacttcagaatattgaaggcttaacaatttttggaccaaaagataacaaaaaacgtagtggagttattgcttttaatattgaaggccttcatccgcatgatgtcgctacggcattggatatggaaggggtagctgtcagagctggtcatcactgtgctcaaccattattgaattatcttgatactccggcaacggctagagcaagcttttatatctataataccaaagcagactgtgataaattggttgaggcacttcaaaaaacaaaggagtttttcaaacttgattaa

SEQ ID NO: 648 - protein, 405 aa, Lactococcus lactis
MLEGIKNEFPVLNQIVNDEPLVYLDNAATTQKPLSVFSAIKDYYENDNANVHRGVHTLAERATEKYEAAREKVRAFINAKSTKEVLFTRGTTTSINWVAQFAGQILKADDEIVISIMEHHSNIVPWQEVAKKTGAILKFVYLKEGELDMEDLRQKVTAQTKFVSIAHVSNVLGTINPIEEISKIAHEQGAYLVVDGAQSTPHMALDLQKMDVDFFAFSGHKMMGPTGIGVLYGKEELLNQFEPVEFGGEMIDFVYKSHSTWTELPWKFEAGTPNIAGAIALGAAIDYIQELGIDQIHQHEAELIDYVMPKLQNIEGLTIFGPKDNKKRSGVIAFNIEGLHPHDVATALDMEGVAVRAGHHCAQPLLNYLDTPATARASFYIYNTKADCDKLVEALQKTKEFFKLD

SEQ ID NO: 649 - DNA, 1230 bp, Bacillus sp.
atgatgaaaaaagacattaaaagctatttcccaattttaaatcaggatgtaaatggtcatagacttgcgtatcttgatagtgcagcgacgtctcaaaaacctgttcaagtaattgaagcaattaaagcctattatgaattcgataattccaatgttcaccgtggtgtgcatacattaggaaaccgtgctacagataaatatgaaggtgcgcgtgaaaaggttcgtaagtttattaatgctcaatcaacacaagaaattatttttactcgtggaacaacgacagcattaaatacagtagcagccagctatggacgtgcaaatgttgctgagggtgatgaaattgtcattactcaaatggagcatcattccaatattattccttggcagcagttagccaaagaaaaaaaggcgacattgaaatacattgagctagaagctgatggtacgattagtttagaaaaagtacgtgcgacgattacaccgcaaacaaaaatcgtgtcggtgtcaatggcatcaaacgtacttggaactattaatccaattaaagaaattgcgcaaattgcacatgctaatggtgctgttatggtggctgatggagctcaagctgctccgcatatgaaaattgatgtccaagatttggatgtagatttcttagggttctcagggcataaaatgtgcggtcctactggaataggtgtactatatggtaaaaaggaacaccttgaaaagatggagccaattgaatttggtggcgaaatgatcgattttgttgggttatatgattcaacgtggaaggaattaccatggaaatttgaaggtggaacgcctattattgcaggtgcaataggattaggtgccgctattgatttcttaactgagattgggctagacaatattgcagagcatgagcataagcttgttggctacgcaatggatcatcttgaaacaattgacggtttaaaaattttcggcccacgtgacccaattaaacgttgtggacttgtgacatttaacttagatgatgtccatccacatgatgtggcaacagtgcttgatatgaatggtattgctattcgtgctggtcatcactgtgcacaaccactaatgaaatgtcttcagcaagtagcgacagcgcgtgcaagcttctatctgtacaatacagaggaggatattgaccgtcttgttgcagggttacgttctgcgaaggagtattttggcgatgtcttttaa

SEQ ID NO: 650 - protein, 409 aa, Bacillus sp.
MMKKDIKSYFPILNQDVNGHRLAYLDSAATSQKPVQVIEAIKAYYEFDNSNVHRGVHTLGNRATDKYEGAREKVRKFINAQSTQEIIFTRGTTTALNTVAASYGRANVAEGDEIVITQMEHHSNIIPWQQLAKEKKATLKYIELEADGTISLEKVRATITPQTKIVSVSMASNVLGTINPIKEIAQIAHANGAVMVADGAQAAPHMKIDVQDLDVDFLGFSGHKMCGPTGIGVLYGKKEHLEKMEPIEFGGEMIDFVGLYDSTWKELPWKFEGGTPIIAGAIGLGAAIDFLTEIGLDNIAEHEHKLVGYAMDHLETIDGLKIFGPRDPIKRCGLVTFNLDDVHPHDVATVLDMNGIAIRAGHHCAQPLMKCLQQVATARASFYLYNTEEDIDRLVAGLRSAKEYFGDVF

SEQ ID NO: 651 - DNA, 1233 bp, Streptococcus infantarius
atgacaaaattagacgctcataaaatcgctcaagacttttgcatccttgaccaagttgtcaatgatgaacctctggtttatctggacaatgcggcaacaactcagaaaccacaagaagtacttgatgcgctcaatcagtattatcatactatcaatgccaatgtgcaccgcggtgttcatacccttgctgaacgtgcaaccgccgcttatgaagccagtcgtgaaacagcacgtcagttcattaatgctaagtcaacaaaagaagtgttatttacacgtggaacaacaactggacttaactgggttgcacagtttgcccaagaagttcttaaaaaagacgatgaagtgcttatttcagttttagaacatcatgcgaatgtcgttccttggcaacaagtttgccataagactggtgcaaaattggtttatgtttatttaaaagatggtcagctggatatggaagatttgcgcagcaaactttcaaataaaacaaaatttgtaagcattgcccatgtttcaaatgttttaggctcagtgcaacctgttaaagaaattgccaaattagctcatgaagttggtgcttatatggtggttgacggtgcacagtctgctcctcatatgacaattgacgttcaagatttggattgtgatttctttgctttctcaggacataaaatgcttggaccaacaggcattggtgtgatttatggtaaagaagaattgctcaatcaaatgtccccagttgaatttggtggggaaatgatcgacttcgtttacgaacaagaagccacttggacagaattgccttggaaattcgaagccgggacaccaaatattgctggtgctattgctttaggcgcggctattgagtatttggataatcttggtttagataatgttcatgcgcatgagcaagaactggttgattatgttttacctaaactacaagccatcgaaggagtaacagtttacggtccacaagaccctagtcagcacatgggagtcatttcatttaattttgatggattgcatccacatgatgtggcaacagcacttgattatgaaggtgttgctgtgcgagcaggacatcactgtgcacaacctttgattaattatcttggaattcattcggcagtgcgcgcaagtttttatatctataatacgaaagaagattgtgataaactaatagaagcaattcttaaaacaaaggagtttttcaatggcactttctag

SEQ ID NO: 652 - protein, 410 aa, Streptococcus infantarius
MTKLDAHKIAQDFCILDQVVNDEPLVYLDNAATTQKPQEVLDALNQYYHTINANVHRGVHTLAERATAAYEASRETARQFINAKSTKEVLFTRGTTTGLNWVAQFAQEVLKKDDEVLISVLEHHANVVPWQQVCHKTGAKLVYVYLKDGQLDMEDLRSKLSNKTKFVSIAHVSNVLGSVQPVKEIAKLAHEVGAYMVVDGAQSAPHMTIDVQDLDCDFFAFSGHKMLGPTGIGVIYGKEELLNQMSPVEFGGEMIDFVYEQEATWTELPWKFEAGTPNIAGAIALGAAIEYLDNLGLDNVHAHEQELVDYVLPKLQAIEGVTVYGPQDPSQHMGVISFNFDGLHPHDVATALDYEGVAVRAGHHCAQPLINYLGIHSAVRASFYIYNTKEDCDKLIEAILKTKEFFNGTF

SEQ ID NO: 653 - DNA, 1239 bp, Lactobacillus helveticus
atggacaaaaatatcaagcaaattagggataattttcctatattaaaacgcaaaatcaatgatagtcccttaatttatttagataatgctgctacagcgcagatacctgtgtcagttagtaaaaaaatgatgcattttgacgaaacttatcgggccaatgttcatcgtggcgtccatactttagggatgtgggctactaagtattacgaaagcgtgcgcgagaaagttaaagatttcattcatgctaaaagtgagcgtgaaatagtatttactagtggttgcactgatagcttgaatttagtagctaatacctatggtgagcagaatattcaggctggggatgaaatcgtggtttccatcatggaacatcacagcaatttacttccttggcaacagttagcgatgcgtaagcatgctaagcttaagttcattgaattagatcaggaacaaaagcttgatttagcagatgctaagaagaagatcacgcctaaaacaaaaattatagcagttgcccaagttagcaacgtattaggatgcattaatccaattaaagaattggctcagctagctcatcaaaataatgcagttattgtcgtggatggcgcgcaggctatcggtcattttgatgttaatgtgcaagaactagaagctgatttttatgctttttctggacataaaatgtttggcccagatggcatcggagttttatatgggagaaaaaagttattagagaagatgccaccatatcgtttaggcggtgaaatgattgctaatgtaacacgtgagggtgctacgtgggctcctgttcctcaaaaatttgaagctggcacgccaaacattgaaggggcaattggcctagaaggcgcaattgattttattgaacatgttggtttagataagctgcggcaatatgagcaagatttaattgattatgtatttccaaaaatacaaaaaatagcaggattgacgttttatggccctcaaaatatcagtgaacgcagcagcgtaatttcctttaatatgcaaggtattcatcctcatgatttggctacagcactagatctagaaggaattgaagtgcgagctggtcatcattgcgcacagcctctaatggaaactctaggagttgaaagtactgtgagagctagttttgcgatttacaatactcaagaagaagcggataagttcttgagcgcattagtagtaataaaggagttcttccaaaatgagcttagatag

SEQ ID NO: 654 - protein, 412 aa, Lactobacillus helveticus
MDKNIKQIRDNFPILKRKINDSPLIYLDNAATAQIPVSVSKKMMHFDETYRANVHRGVHTLGMWATKYYESVREKVKDFIHAKSEREIVFTSGCTDSLNLVANTYGEQNIQAGDEIVVSIMEHHSNLLPWQQLAMRKHAKLKFIELDQEQKLDLADAKKKITPKTKIIAVAQVSNVLGCINPIKELAQLAHQNNAVIVVDGAQAIGHFDVNVQELEADFYAFSGHKMFGPDGIGVLYGRKKLLEKMPPYRLGGEMIANVTREGATWAPVPQKFEAGTPNIEGAIGLEGAIDFIEHVGLDKLRQYEQDLIDYVFPKIQKIAGLTFYGPQNISERSSVISFNMQGIHPHDLATALDLEGIEVRAGHHCAQPLMETLGVESTVRASFAIYNTQEEADKFLSALVVIKEFFQNELR

SEQ ID NO: 655 - DNA, 1272 bp, Streptococcus pneumoniae
ttgcaactatcgaagagaaattgtcaaaacgctaaggggaagcctatgttagatgtagaagcgattcgcaaggattttccaattttagatcagattgtcaatgatgaacctctggtctatctggacaatgctgcgacgacacaaaaaccactagtagttctgaaagctattaacagctactatgaacaggacaatgccaatgttcaccgtggtgtccataccttagcggaacgagcgacagcttcttatgaagctgctcgtgaaaccattcgtaagtttattaatgcaggctctacaaaggaagttctctttaccagaggaacgacaaccagccttaactgggtggcacgctttgctgaggaaattctcactgagggagaccaggtcttgatttcagtaatggaacaccattctaatatcattccatggcaggaagcttgtcgaaagactggagcagagcttgtctatgtctatcttaaagacggtgccttggatatggaggatttgcgagctaaattgactgataaggttaaatttgtttccctagctcatgcctccaatgttcttggtgtggtcaatccgattaaggaaatcactcaattagcccaccaagttggggcaatcatggtagtggatggtgctcaatctacacctcatatgaagattgatgtccaggacttggatctggactttttcgccttttcgggtcacaagatggctggtccgactggtatcggtgtcctttacggcaaagaaaagtatcttgagcaaatgtctccagtagaatttggcggcgagatgattgattttgtctacgagcaatccgctagttggaaggaattgccttggaaatttgaggctggaacgccaaatatggcaggagctattggacttgcgactgcagttgattatctggaaaagattggtatggatgccgttgaagctcatgaacaggaattgattgcgtacgtctatccaaaactgcaggcaattgagggattgaccatttacggttctcaggatttggctcaacgttcgggtgttattgcctttaacctaggtgatctccatcctcacgatcttgcgacggctctggattatgaaggagtggctgttcgtgctggtcaccattgtgcgcaacccttgcttcagtatttggaagtcccagcaacagctcgtgcaagtttttatatctacaataccaaggcagattgcgacaaactagtcgatgccctacaaaagacaaaggagtttttcaatggcactttctaa

SEQ ID NO: 656 - protein, 423 aa, Streptococcus pneumoniae
MQLSKRNCQNAKGKPMLDVEAIRKDFPILDQIVNDEPLVYLDNAATTQKPLVVLKAINSYYEQDNANVHRGVHTLAERATASYEAARETIRKFINAGSTKEVLFTRGTTTSLNWVARFAEEILTEGDQVLISVMEHHSNIIPWQEACRKTGAELVYVYLKDGALDMEDLRAKLTDKVKFVSLAHASNVLGVVNPIKEITQLAHQVGAIMVVDGAQSTPHMKIDVQDLDLDFFAFSGHKMAGPTGIGVLYGKEKYLEQMSPVEFGGEMIDFVYEQSASWKELPWKFEAGTPNMAGAIGLATAVDYLEKIGMDAVEAHEQELIAYVYPKLQAIEGLTIYGSQDLAQRSGVIAFNLGDLHPHDLATALDYEGVAVRAGHHCAQPLLQYLEVPATARASFYIYNTKADCDKLVDALQKTKEFFNGTF

SEQ ID NO: 657 - DNA, 1221 bp, Geobacillus sp.
atgaatacgaaagaggttcggcagctgtttccgattttggaccaagaagtaaacgggaagccgcttatatatcttgacaatgctgcgacatcacagaaacctcttcccgtcattgaagcgattgatcactattatcgccagtacaattcaaatgtccatcgcggcgtgcatacgcttggtacgaaagcgacggacgcatatgaaggagcacgtgaaaaggtacgacggtttattaatgcgaagtccacacaagaaatcatttttacaagaggaacgacaacggcgttaaatatggttgcagcgagctatggccgcgctaatttacaagaaggcgatgaaattgtcatcacgtacatggagcaccatagcaatattattccatggcagcaagtcgctaaacatacgggagccacattaaagtatattccgcttcagccagatggaacgatcgacctaaaagatgtagaagcggcggtcacatccaatacaaaaattgtcgctattgtacatgtttccaacgttttaggaacgattaacccagtaaaagaaattgcaaaaatcgcccacaaacatggcgctgtcatcgtagtggacgccgcgcagagcgctcctcatatgaaaatcgatgttcaagatctagattgtgattttttggcgttttctgggcataaaatgtgcggtccgacaggaattggcgtattatatggtaaaagggaattattagagaagatggaaccggtagagtttggcggcgaaatgattgatttcgtcggcctgtacgaatcgacatggaaagagcttccgtggaaattcgagggcggtactccaattattgcgggagccatcggtttaggagcggcaatcgacttccttgaagaaatcggattagataatatcgctgcacatgagcaggaacttgcccagtacgctttagaacagttgtccgcgatagaagggatcacgatttatggtccaaaacatcgcggaggattagtgacgtttaacatagaaggagttcatccgcatgatgtggcaaccgtccttgacgcggaagggatcgccgtccgcgccggtcaccattgcgcccaaccgttaatgaaatggttaaacgtaacagctacagcgcgtgcaagtttttacctctataatacaaaggaagaaatcgatcaactcgtagtcgcattacagaaaacaaaggagtattttggtcatgtcttctaa

SEQ ID NO: 658 - protein, 406 aa, Geobacillus sp.
MNTKEVRQLFPILDQEVNGKPLIYLDNAATSQKPLPVIEAIDHYYRQYNSNVHRGVHTLGTKATDAYEGAREKVRRFINAKSTQEIIFTRGTTTALNMVAASYGRANLQEGDEIVITYMEHHSNIIPWQQVAKHTGATLKYIPLQPDGTIDLKDVEAAVTSNTKIVAIVHVSNVLGTINPVKEIAKIAHKHGAVIVVDAAQSAPHMKIDVQDLDCDFLAFSGHKMCGPTGIGVLYGKRELLEKMEPVEFGGEMIDFVGLYESTWKELPWKFEGGTPIIAGAIGLGAAIDFLEEIGLDNIAAHEQELAQYALEQLSAIEGITIYGPKHRGGLVTFNIEGVHPHDVATVLDAEGIAVRAGHHCAQPLMKWLNVTATARASFYLYNTKEEIDQLVVALQKTKEYFGHVF

SEQ ID NO: 659 - DNA, 1215 bp, Leuconostoc citreum
atgaaaattaaaccatcagattttcctattttggcacaacaggtcaaccaacatcgactagtgtatttggatagtgcagcaacatctcagaaaccagcaagcgtactggcagctttgaaccaatactatacccatgacaatgcaaatgttcatcgtggtatttatgatttatcacaacgagccaccactgcttacgaattagcacgagataaagtacaacattttatccatgctaagaaacgtgaagaaattctttttacgcgtggtacaaccgaagcgattaattgggttgcgcaaacttacggcatgacgcatattaatcctagtgatgaaattgttatttcttatatggagcaccatgccaatattgtgccgtggcaacaacttgctaaacaacgtggtgcaaccctaaaatatattaggttagctgccaatggcacattagatatgcacgatgcagacaaacaaattacggcacgtactaaaattgtttctatcacacaggcgtcaaatgtgttgggtgttgttaacccaattaaacaaatcgcagctttggctcatgctcaacacgcagtattgttggttgatggtgcgcaatctgtaccccacatgccaattgatgtgcaacaattagatgctgatttttttgttttttcaggtcataaaatgatgggtccaacaggaattggcgtcttatatggcaaacgtgaccttttggcacacataccacctgcgcaatttggtggtgaaatggtaacaactgtttcacaaaatgacgctcattttcaaccattgccttggcgatttgaggctgggacacctaatattgctggagccattggtttgggtgctgcaattgattatctactgacattagatatggtggaagttgccaaatatgagcaacaactaacacaatacgcattagagtcattacataaaattgatgctattacggtttatggtgctgatgatgtccaccaaacagggattattacttttaacatggcaggcgtacatgcacatgatttagccacggcattagatcaattgggtattgcagtacgtgctgggcatcactgtgcgcagccactaatgcgttatttaggcgtagctgcaacggtgcgcatgagtttctatgtgtataatacgcttgacgatattgatgacactgttgctgcaataaaggaaataaaggattactttaaaaaatga

SEQ ID NO: 660 - protein, 404 aa, Leuconostoc citreum
MKIKPSDFPILAQQVNQHRLVYLDSAATSQKPASVLAALNQYYTHDNANVHRGIYDLSQRATTAYELARDKVQHFIHAKKREEILFTRGTTEAINWVAQTYGMTHINPSDEIVISYMEHHANIVPWQQLAKQRGATLKYIRLAANGTLDMHDADKQITARTKIVSITQASNVLGVVNPIKQIAALAHAQHAVLLVDGAQSVPHMPIDVQQLDADFFVFSGHKMMGPTGIGVLYGKRDLLAHIPPAQFGGEMVTTVSQNDAHFQPLPWRFEAGTPNIAGAIGLGAAIDYLLTLDMVEVAKYEQQLTQYALESLHKIDAITVYGADDVHQTGIITFNMAGVHAHDLATALDQLGIAVRAGHHCAQPLMRYLGVAATVRMSFYVYNTLDDIDDTVAAIKEIKDYFKK

SEQ ID NO: 661 - DNA, 1227 bp, Listeria monocytogenes
atgattgatatccaaaaaattcgggcggattttccaattttagctcaagaaataaatgaaaaaccgctagcttatttagataatgctgccacttcacaaaagccgaaacaagttattgaagctttaacacattactatgagtttgataatgcgaacgttcaccgtggtgtgcatacgcttgcggcaagagcgacggatgcttatgaatcagctcgaggtaaagtagccaagtttattcatgcgcgtgaagtagcagaaattattttcacaagaggcactacttcagcgattaatttagttgtagatagttacgcggaagcaaatattgaagctggcgatgagatagttatttcttatttagagcatcattctaatttgattccatggcaacaactagctaaacgcaaaggcgcggttttaaaatatatcgaactagaagaagatggcacgatttcagtggaacaagcgaaaaaaacgattggcgagaaaacgaaaatcgttgcgctagcacatgtttctaatgttctagggacaatcacgccaattaaagaaatcgcagcaattgctcatcaatttggagcagtcattctcgttgacggtgcgcaagctgtgcctcatatggaagtcgatgtagttgatttagatgctgacttttatgctttttcagggcataaaatgatggctcctactggcattggcgctttgtatggcaaacgtgaattgcttgatgcgatggaacctaccgaatttggcggagaaatgattgattttgttgaattatacgattcgacttggaaagaactaccttggaaatttgaagccggaacaccgattattggcggagcaattgcgctaggtgcggcgattgattacttggcagaagtcggactcgaaaacattcacgcacatgaacaagcattagccagctacgcgatggaagaaatgagcaaaatcgaaggcattaccatttacgggccgaaagatgcaagtaaacgttgtggtttagtgacttttaatttagaaggcgcacacccacatgatattgcgactattttggacgaagatggggtggcgattcgagctggacatcactgtgcacaaccgttgatgaaatggctggacgtttcttccacagctcgcgcaagcttttatatttataatacaaaagaagaaattgatgcgcttatagatggcctcaagttaacaaaggagtattttggattatga

SEQ ID NO: 662 - protein, 408 aa, Listeria monocytogenes
MIDIQKIRADFPILAQEINEKPLAYLDNAATSQKPKQVIEALTHYYEFDNANVHRGVHTLAARATDAYESARGKVAKFIHAREVAEIIFTRGTTSAINLVVDSYAEANIEAGDEIVISYLEHHSNLIPWQQLAKRKGAVLKYIELEEDGTISVEQAKKTIGEKTKIVALAHVSNVLGTITPIKEIAAIAHQFGAVILVDGAQAVPHMEVDVVDLDADFYAFSGHKMMAPTGIGALYGKRELLDAMEPTEFGGEMIDFVELYDSTWKELPWKFEAGTPIIGGAIALGAAIDYLAEVGLENIHAHEQALASYAMEEMSKIEGITIYGPKDASKRCGLVTFNLEGAHPHDIATILDEDGVAIRAGHHCAQPLMKWLDVSSTARASFYIYNTKEEIDALIDGLKLTKEYFGL

SEQ ID NO: 663 - DNA, 1239 bp, Lactobacullus johnsonii
atggccaaattaaacactgaaaaaataaagcaggattttccaatttttaatcaaaagattaatgatgaaactcttgtttatctagataatgctgcaactagccaaataccgaagtttgttgaagaaaaagttagagattttaatgaaaaagaacgtgcaaatgtccatcgcggagtccatgcattaggcttaagagctactaatcaatatgaatcaagccgtcaaaaggtggctaattttattggcgcaaataatgctaaagaagttatttttacttctggatgtactgatagtttaaatttagttgcagctagcttcggtgaacaaaatattcaggcaggggatgagatcctagtctcaattatggaacatcatagtaatcttttgccttggcagcaacttgctaaaagaaaacaggctaagttaaattttattgaaataaattcagatggcttacttgatattaaaaatttaaaaagtaagatcaattcaaaaactaaaattgttgccttgacgcatgtaagcaatgttttgggcacaattaatccaattaaggagcttactgatctagctcatgaaaaaggagcaattgttgtagttgatggtgcacaagcagttggacattttccaattgatgtagctgaattaaatgtagatttctatgctttttctggccataaaatgtttgctccgacaggaattggtgttttatatgggaaaaaagatctcttagataaaatgcagccttatcgtttgggtggtgaaatgattgctaatgtaactagagaaggagcaacatgggcagaagtaccatataaatttgaagctggtacaccaaatattgctggtgccattggacttggagcagcaattgattatctgcagtctctagactttgagcttattcaaaaacatgaacaggaattgacaagttatgccttagaaaagcttaaaaatgtttcaggattaacaatctatggtccacaaaaaagtaatggtcgcattggagtaatatcttttaatttaaagaatattcatccccatgacttagcgactgcactagatttaaacggaattgaagttcgtgctggccatcattgtgctcagccgctaatggctagccttaatacggagtcaactgttcgagctagtttatctatttataatactaaagatgatattgataaattagtaagttctctccatgaagcaaaggagtttttcagtgagtttagataa

SEQ ID NO: 664 - protein, 412 aa, Lactobacullus johnsonii
MAKLNTEKIKQDFPIFNQKINDETLVYLDNAATSQIPKFVEEKVRDFNEKERANVHRGVHALGLRATNQYESSRQKVANFIGANNAKEVIFTSGCTDSLNLVAASFGEQNIQAGDEILVSIMEHHSNLLPWQQLAKRKQAKLNFIEINSDGLLDIKNLKSKINSKTKIVALTHVSNVLGTINPIKELTDLAHEKGAIVVVDGAQAVGHFPIDVAELNVDFYAFSGHKMFAPTGIGVLYGKKDLLDKMQPYRLGGEMIANVTREGATWAEVPYKFEAGTPNIAGAIGLGAAIDYLQSLDFELIQKHEQELTSYALEKLKNVSGLTIYGPQKSNGRIGVISFNLKNIHPHDLATALDLNGIEVRAGHHCAQPLMASLNTESTVRASLSIYNTKDDIDKLVSSLHEAKEFFSEFR

SEQ ID NO: 665 - DNA, 1230 bp, Bacillus sp.
atgaatgctaaagagattcgtaaatattttccgattctcgaccaggaagtcaatggacatcctttagtgtatcttgatagtgctgctacttcacaaaaacccgtgcaagtaatagaagcattggataagtattaccgtgagtataactcgaatgtccatcggggcgtccatacccttggaaccctggcgacagacgggtatgaaggttcccgcgagaaggtccgcaagttcatcaatgcggcttctaccgaggaaatcatttttacccgcggtacaacgactgcgatcaatacagtcgcagccagctatggcagagcaaatgtcggggaaggtgatgaaatcgtgatctcccatatggagcatcacagtaacatcattccatggcagcaactcgctaaagaaactggggcaacattgaagtatgtcccactccaggaagacggaaccatctcaattgaagatgtgaaaaatactgtaacatccaatacaaaaatcgtttccatcatgaaggtatccaatgtattgggaacgatgaatccagtcaaagagattgccaaagtggcgcacgacaatggagcggtcatgatggtggacggtgctcaggctgcccctcacatgaaggttgacgtacaggaccttgattgcgacttcttcgctttctccggtcataaaatggctggccctacgggtataggagtcctttatgggaagaaacatctccttgagaacatggagccggttgaatttggcggagaaatgattgattttgtaggaatgtatgagtcgacatggaaagagcttccgtggaagttcgaaggtggtactccaattattgccggggctatcggccttggagcggccattgattttcttgaggaaatcggcttggaccatattgaaaaacatgaacacgaattagctgcttatgcgatggaaaaaatgtccgggattgaaggcatgaccatctacggcactaaggatcctgccaagcgcgcaggacttgtcactttcaatatcgatgatgtccatccccatgatgttgcgacagtattggatgcagaaggaattgccgtacgtgccggccaccattgtgcgcagcctctaatgaagtggctgaaagtatcggcgacagcgcgggcaagcttctacgtttacaatacagaagaagatattgataagcttgtttcaggactagtgagaacaaaggagtatttcagcgatgtcttttaa

SEQ ID NO: 666 - protein, 409 aa, Bacillus sp.
MNAKEIRKYFPILDQEVNGHPLVYLDSAATSQKPVQVIEALDKYYREYNSNVHRGVHTLGTLATDGYEGSREKVRKFINAASTEEIIFTRGTTTAINTVAASYGRANVGEGDEIVISHMEHHSNIIPWQQLAKETGATLKYVPLQEDGTISIEDVKNTVTSNTKIVSIMKVSNVLGTMNPVKEIAKVAHDNGAVMMVDGAQAAPHMKVDVQDLDCDFFAFSGHKMAGPTGIGVLYGKKHLLENMEPVEFGGEMIDFVGMYESTWKELPWKFEGGTPIIAGAIGLGAAIDFLEEIGLDHIEKHEHELAAYAMEKMSGIEGMTIYGTKDPAKRAGLVTFNIDDVHPHDVATVLDAEGIAVRAGHHCAQPLMKWLKVSATARASFYVYNTEEDIDKLVSGLVRTKEYFSDVF

SEQ ID NO: 667 - DNA, 1224 bp, Bacillus clausii
atgaacgcaaaggagataaagaagctgttcccgatcctcgaccaacaagtaaacgggaatcctcttgtctatctcgacagcgccgccacttcgcaaaagccaatccaagtcattgaaaagctcgatgactattaccgccgttacaattctaatgtccatcgtggcgtgcatacgcttggtacgcttgctactgatgaatatgaaggcgcacgcgaaaaagtccgcgctttcttgaatgcgcaagacacggcggagattgtctttactcgtggcacaaccacggccattaatttagtggcgcaaagctatggaactgaccatgtcggcgaaggcgatgaaattgtcattacgccaatggaacaccattcgaatatcattccatggcagcagcttgccaagcggaaaggggccgtgttgaagtatatccctttgcaagaagatgggacgattgcattagcggatgtcgaaaaaacgataacggaacgaacaaaaatcgtttccgttgtctacgtttcaaatgtgctcggtacagttaacccaattgctgaaatggcgaaagtcgcccataaacatggcgcggtcatggtcgtcgatggcgcccaagccgctccccatgtccacgtggatgtccaacaattagactgtgacttttttgctttctcggcacacaaaatgtgtggccccactggcattggcgccttatacggcaaaaaagcgctgcttgaagcaatggagccaattgaatttggtggggaaatgattgattttgtcggtctgcaagattcgacttggaaagagctcccgtggaagtttgaagggggaacgccaatcattgctggcgcaatcgggttcggtgctgcgattgattttgtcaccgatttagggtttaatgaaattgaacagcacgaaaaagaactcgttgactattcgtttgagcgtctcggcgatttcaaagatttgacgatctttgggccaaaagaccgtgcaggggtgatcacattccagcttggcgacgtgcacccccacgatgtagcgactgtccttgatgctgaaggaattgctgttcgcgcaggccatcattgtgcacaaccgttaatgaaatggcttgacgttgtcgccactgctcgtgccagctattatgtgtacaatacgaaagaagatattgatgctctggcaaacggattagtcaaagcaaaggagtattttagcgatgtcttctcgtga

SEQ ID NO: 668 - protein, 407 aa, Bacillus clausii
MNAKEIKKLFPILDQQVNGNPLVYLDSAATSQKPIQVIEKLDDYYRRYNSNVHRGVHTLGTLATDEYEGAREKVRAFLNAQDTAEIVFTRGTTTAINLVAQSYGTDHVGEGDEIVITPMEHHSNIIPWQQLAKRKGAVLKYIPLQEDGTIALADVEKTITERTKIVSVVYVSNVLGTVNPIAEMAKVAHKHGAVMVVDGAQAAPHVHVDVQQLDCDFFAFSAHKMCGPTGIGALYGKKALLEAMEPIEFGGEMIDFVGLQDSTWKELPWKFEGGTPIIAGAIGFGAAIDFVTDLGFNEIEQHEKELVDYSFERLGDFKDLTIFGPKDRAGVITFQLGDVHPHDVATVLDAEGIAVRAGHHCAQPLMKWLDVVATARASYYVYNTKEDIDALANGLVKAKEYFSDVFS

SEQ ID NO: 669 - DNA, 1221 bp, Bacillus pumilus
atgaatatcaaagacgttcgtgagcaatttccaatccttcatcagcaagtgaacggacatgatttggtgtatttggacagtgcagcgacttctcaaaaaccaagagtggtcattgatgcaatgaatgagtattaccggtcttacaactcgaacgtccacaggggtgttcatacccttggcacaagagcaacggacgcatacgagggtgcgagagagaaagttcgtgcattcatccgtgcttcatctgtccaggagattatttttacgagaggtacaacaactgcactaaacacagtggcgatcagctatgctagagcaaacctcaaagaaggcgatgagattgtcattacgcacatggagcaccatgcgaatatcatcccttggcagcaagcagcaaaagcaactggcgccacattgaaatacattccgttacaggaagacggcacgctatcgcttgaagatgtgaagcaaacgatcacacatcaaacgaaaatcgtcgctgtcacacatgtttcaaacgtattaggaaccatcaacccgattaaagacatcgcaaaaattgcccacgatcacggtgctattctcgttgtcgatggtgcgcagagcaccccgcacatgcaaattgatgttcaggatctagattgtgactttttcgcattctctgggcataaaatgtgtggaccgactggcatcggtgtactttacgggaagaaggaccttttgaataatatggagcctgctgagtttggcggtgaaatgatcgactttgtggatctgtatgattctacttggaaagagcttccgtggaaatttgaagcgggtacaccgattattgccggagcagttggactcggaaaagcgattgatttcttaaatgacattggtatggaggaagtcagccgttacgagcatcagcttgccacttatgcgcttgaacgctttaaggagcttgatggtgcgactgtttatggaccgcagcaccgagctgggcttgtgacgtttaatttagatgatgtccatccgcatgatgcgtctactgttctggatacggaaggtgtcgccattcgtgcaggacaccattgtgcacagccgctcatgaaatggcttggtgtatcagcgactgcaagagcaagcttctatctgtataatacagaagaagagattgacaaactgattgcagcgctccgtaagacaaaggagtattttacgaatgtcttttaa

SEQ ID NO: 670 - protein, 406 aa, Bacillus pumilus
MNIKDVREQFPILHQQVNGHDLVYLDSAATSQKPRVVIDAMNEYYRSYNSNVHRGVHTLGTRATDAYEGAREKVRAFIRASSVQEIIFTRGTTTALNTVAISYARANLKEGDEIVITHMEHHANIIPWQQAAKATGATLKYIPLQEDGTLSLEDVKQTITHQTKIVAVTHVSNVLGTINPIKDIAKIAHDHGAILVVDGAQSTPHMQIDVQDLDCDFFAFSGHKMCGPTGIGVLYGKKDLLNNMEPAEFGGEMIDFVDLYDSTWKELPWKFEAGTPIIAGAVGLGKAIDFLNDIGMEEVSRYEHQLATYALERFKELDGATVYGPQHRAGLVTFNLDDVHPHDASTVLDTEGVAIRAGHHCAQPLMKWLGVSATARASFYLYNTEEEIDKLIAALRKTKEYFTNVF

SEQ ID NO: 671 - DNA, 1221 bp, Geobacillus kaustophilus
atgaatgtgaacgaaattcgcgcgttgtttccgattttgcatcagcaagtgaacggccatccgctcgtctattttgacagcgcggcgacgtcgcaaaagccgctgccggtgattgagacgcttgaccgctactaccgcgagtacaactcgaacgtccaccgcggcgtccatacgctcgggacgaaggcgaccgatgcgtacgaaggcgcgcgcgaaaaagtgcggcggtttttaaacgcccaatcggcgcaggaaatcatctttacgcgcggcacgaccgctgcgctcaacttggtcgctgcaagctacgggcgcgccaatgtcaaagaaggcgacgagatcgtcatcacgtacatggagcatcacagcaacttaatcccatggcagcagctggcgaaacaaacgggcgcaacgctgaaatacattccgctgcaggaagacggcacgatcgatttgcgcgacgttgaggcggccatcaccaaagcggcgaagatcgtcgccatcgcccatgtgtccaacgttcttgggacgatcaacccggtgcgggagatcgcccgcatcgcccatgagcgcggggcggtcgtcgtcgtcgatgcggcgcaaagcgctccgcatatgaaggtcgatgttcaggaacttgattgcgattttctcgccctttccggccataaaatgtgcgggccgacgggaatcggcgtattatatggcaaaaagaaatggcttgcgcagatggagccaatcgagttcggcggtgaaatgatcgattttgtcgagctgtacgactcgacgtggaaagagctgccgtggaagtttgaaggcggcacgccgatcatcgccggggcgattggccttggtgcagcgatcgatttccttgaacaagtaggcttggacgccatcgccgcccatgagcatgagctggcgcaatatgcgcttgaacgaatggcggacatcgaaggcgtcaccgtctatggcccgaaagagcgggcggggcttgtcacgttcaacatcgacggggtgcatccgcacgatgtggcgactgtccttgacgccgaaggaatcgccatccgcgccggccaccattgcgcccagccgctcatgaaatggctcggcgtgacggcgaacgcccgggcgagcttttacctttacaataccaaagaggaaatcgatgcattcatcgccgcattacagaaagcgaaggagtacttcagccatgtcttctaa

SEQ ID NO: 672 - protein, 406 aa, Geobacillus kaustophilus
MNVNEIRALFPILHQQVNGHPLVYFDSAATSQKPLPVIETLDRYYREYNSNVHRGVHTLGTKATDAYEGAREKVRRFLNAQSAQEIIFTRGTTAALNLVAASYGRANVKEGDEIVITYMEHHSNLIPWQQLAKQTGATLKYIPLQEDGTIDLRDVEAAITKAAKIVAIAHVSNVLGTINPVREIARIAHERGAVVVVDAAQSAPHMKVDVQELDCDFLALSGHKMCGPTGIGVLYGKKKWLAQMEPIEFGGEMIDFVELYDSTWKELPWKFEGGTPIIAGAIGLGAAIDFLEQVGLDAIAAHEHELAQYALERMADIEGVTVYGPKERAGLVTFNIDGVHPHDVATVLDAEGIAIRAGHHCAQPLMKWLGVTANARASFYLYNTKEEIDAFIAALQKAKEYFSHVF

SEQ ID NO: 673 - DNA, 1224 bp, Bacillus selenitireducens
atgaatgtccatgacgttcgcaaacagttcccgatcctcgatcaggaggtaaacggtcatccgctcgtttaccttgacagtgctgcgacgtcccaaaagcccgttcaggtcattgaagcagtcaatgattattaccgccgttacaattccaatgtgcaccggggggttcacaccctcggttcattggccacggacggttatgaaggagcaagggaaaaagtccagaaattcatcaatgccaagcgcgtggaagaaatcatcttcacgcgcggtacaacaacagccatcaataccgtggcaaggagctacggggatgccaatgtgaaggaaggtgacgaaatcgtcatcacgccgatggaacatcacagtaacatcatcccctggcaacagcttgcgaaacgcacgggagcagtcctgaagtatatccctcttcagcctgacggcacgatcagtcttgaagacgcggaggcgacgattacggagcgcacgaagatcgtcgctgtcatgcatgtctccaacgtcctcgggacaatcaatccgattaaagacatcgcggccatcgcacacaagcatgacgctgtgatgcttgtcgatggtgcccagtctgccccgcatatggtcattgacgtgcaggatctcaatgcggatttttatgcgttctctgcccacaagctttgcggtccgacaggtgtcggtgccctttacggcaaacgcaagctgctccggaagatggagcccgtggagtttggcggtgagatgatagattttgtggatctccaggattccacgtggaaagagcttccgtggaaatttgaagggggtacaccgatcatcgccggtgccatcggttttggtgcagcgattgattttcttaatgagatcggcttggaagagattgaagcccatgaaaaaaagctcgtcacgtatgcgaaagaacgtcttgatcagatggacggtgtcacggtctacggtccaaaagagcgggccggcgtgctgacgttcaactgtgatgacgtgcatccgcacgatgtggccacggttcttgacgcggaaggcgttgccgtccgtgccggtcatcactgtgcccagcctttgatgaaatggcttgatgtaacggcgactgcaagagcgagcttttatctgtataatacggagaaggaagtcgacgcatttgcagacgcgttaataaaagcaaaggagtatttcggagatgtctttagataa

SEQ ID NO: 674 - protein, 407 aa, Bacillus selenitireducens
MNVHDVRKQFPILDQEVNGHPLVYLDSAATSQKPVQVIEAVNDYYRRYNSNVHRGVHTLGSLATDGYEGAREKVQKFINAKRVEEIIFTRGTTTAINTVARSYGDANVKEGDEIVITPMEHHSNIIPWQQLAKRTGAVLKYIPLQPDGTISLEDAEATITERTKIVAVMHVSNVLGTINPIKDIAAIAHKHDAVMLVDGAQSAPHMVIDVQDLNADFYAFSAHKLCGPTGVGALYGKRKLLRKMEPVEFGGEMIDFVDLQDSTWKELPWKFEGGTPIIAGAIGFGAAIDFLNEIGLEEIEAHEKKLVTYAKERLDQMDGVTVYGPKERAGVLTFNCDDVHPHDVATVLDAEGVAVRAGHHCAQPLMKWLDVTATARASFYLYNTEKEVDAFADALIKAKEYFGDVFR

SEQ ID NO: 675 - DNA, 1227 bp, Streptococcus pyogenes
ttgctagacgcaaaagacatcaaacaagactttcaaatcttaaatcaacaagtcaatgatgaaccccttgtttatttggataatgccgccaccacacaaaaaccggcgcttgttcttgaggctttgcaatcctattatcaagaagataatgctaatgttcaccgaggagttcataccttggctgaacgtgcaacgcacaaatatgaggccagtcgccagcacgttgctgactttattcatgctaaatcaagcaaggaagtgctctttaccagaggaacaacaaccagtttgaattgggttgctcggtttgcagagcaggtcttgacgccagaagatgaggtgttgatttcgattatggagcatcatgccaatatcattccttggcaacaagcctgtcaaaaaacaggagcaaggttagtctatgtttatttaaaagatggccaacttgacatggacgatttgacaaacaaattgacgacaaaaacacgttttgttagcctagtacatgtctccagtgttcttggttgcatcaatcccattaaagaaattgccaagctggcacatgctaaaggagcctaccttgttgttgacggtgcccagtcggttccacatttggctattgatgttcaagacttggattgtgatttctttgctttttcagctcataagatgttggggccaacaggtttgggtgttctttacggcaaagaagagcttttgaatcaagtggagcctcttgaatttggcggagaaatgattgattttgtttacgaacaagaggccacttggaaagaattgccctggaagtttgaagcaggaacacctcacatagctggtgctattgggctaagcgcagccatttcttaccttcagagactaggcatggctgatatacatgcgcatgaagcagaactaatagcctatgttttgccgaaattagaagctattgaggggcttaccatatatggaccaagccagtctagtgcaagatctggtctgatttcttttaatctggatgatttgcatcctcatgacttggcaacagccttggactatgaaggtgttgcagtaagagcagggcaccactgcgcccaacctcttcttagttatttaggtgtaccagcaactgttagagcaagtttttatatctataacaccaaggcagattgtgaccgtctagtcgaagcaattctaaaagcaaaggagtttttcaatggcactctctaa

SEQ ID NO: 676 - protein, 408 aa, Streptococcus pyogenes
MLDAKDIKQDFQILNQQVNDEPLVYLDNAATTQKPALVLEALQSYYQEDNANVHRGVHTLAERATHKYEASRQHVADFIHAKSSKEVLFTRGTTTSLNWVARFAEQVLTPEDEVLISIMEHHANIIPWQQACQKTGARLVYVYLKDGQLDMDDLTNKLTTKTRFVSLVHVSSVLGCINPIKEIAKLAHAKGAYLVVDGAQSVPHLAIDVQDLDCDFFAFSAHKMLGPTGLGVLYGKEELLNQVEPLEFGGEMIDFVYEQEATWKELPWKFEAGTPHIAGAIGLSAAISYLQRLGMADIHAHEAELIAYVLPKLEAIEGLTIYGPSQSSARSGLISFNLDDLHPHDLATALDYEGVAVRAGHHCAQPLLSYLGVPATVRASFYIYNTKADCDRLVEAILKAKEFFNGTL

SEQ ID NO: 677 - DNA, 1230 bp, Bacillus sp.
atggatttcaagaatatccgtgaacatttccctattctgaaccaggaagtcaacggaaggcctttggtttaccttgacagcgccgcaacttcccagaagcccgtacaggtcatcgaggcattgaacgagtattaccgcgggtataactccaatgtccaccgcggggtgcataccctcggtacaaaagcgacggatgcgtatgaaggtgcaagggaaaaggccaggaaattcattaatgcccgttcgattgaggaagtgatcttcacgagcgggacaacaagcgcattgaatatggttgcttcaagctatggaggagacaatctctccgaaggggatgaaattgtcattacctatatggagcaccacagcaatatcattccgtggcagcaggcagccaaaagagccggagcggtgctgaaatatgtccctcttcaggaggacggcaccatttcactggaggatgtccgcaagacggttacaagcaatacgaaaattgtcagcattatgatggtgtccaatgtccttggcgttatgaacccgatcaaggacatcgcaaggattgcccatgagaatggcgcgatcatggtagtggacggcgcacaggctgcacctcatatgaaggtggatgtccaggatcttgactgcgacttccttgctttttcaggacataagatgtgcggccctaccggtatcggcgtcttgtacggcaaaaagcagcttcttgaaaacatggagcctgtccttttcggaggagagatgatcgattttgttgatctctatgactctacctggaaagagcttccctggaagttcgaggccggcaccccgattattgcaggagccatcggccttggtgcagcaatcgatttcctacaggaagtcggccttgaaaacattgaagcacatgagcataggcttgccgcatacgcaatggaaaaaatgtcatcagttgaaggcatgaccatctatggaccgaagaatgccggcgagagagccggacttgtaaccttcaatcttgatgatgtccatccgcatgatgtggcgactgtccttgatgctgaaggaatagcggtaagggcaggccatcactgtgcacagccgctgatgaaatggctgaaggcttccgcaacggcacgggccagtttttacctgtacaacacggaagaagatattgataagcttgttgaaggacttgttaaaacaaaggagtatttcagcgatgtcttttaa

SEQ ID NO: 678 - protein, 409 aa, Bacillus sp.
MDFKNIREHFPILNQEVNGRPLVYLDSAATSQKPVQVIEALNEYYRGYNSNVHRGVHTLGTKATDAYEGAREKARKFINARSIEEVIFTSGTTSALNMVASSYGGDNLSEGDEIVITYMEHHSNIIPWQQAAKRAGAVLKYVPLQEDGTISLEDVRKTVTSNTKIVSIMMVSNVLGVMNPIKDIARIAHENGAIMVVDGAQAAPHMKVDVQDLDCDFLAFSGHKMCGPTGIGVLYGKKQLLENMEPVLFGGEMIDFVDLYDSTWKELPWKFEAGTPIIAGAIGLGAAIDFLQEVGLENIEAHEHRLAAYAMEKMSSVEGMTIYGPKNAGERAGLVTFNLDDVHPHDVATVLDAEGIAVRAGHHCAQPLMKWLKASATARASFYLYNTEEDIDKLVEGLVKTKEYFSDVF

SEQ ID NO: 679 - DNA, 1227 bp, Paenibacillus larvae
atgattggggctgaaatccgtaaattgtttccgattctgaatcaggaaatgaacgggcacccgctagtttatttggataacggggccacttcacagaagccggtttcagtgctggatgcgttgaagaaatattacgagtgggataattccaatgttcatcgcggtgtgcacacacttggttcccgtgcaaccgatgcctatgaaggagcacgctcgaaggtcgtccgattcattcatgccaaatcagagaaagaaataatctttactcgcggtacaacttcttccattaatctggtggcatccggttatgttcgtgcccatttgcatgaaggtgatgaaattgtcattacaccaatggagcatcacagtaatctgattccgtggcagcaggctgccaaagctaccggtgctacactcaaatacatccccctccagcctgacggaaccataagtctggaggatgtggaaaacaccattaccgaacggacgcgtttcgtctctgtggttcatatgtccaacgtgctcggattggtcaatccggtgaaggagattgctgctattgctcatcgttacggggcggagattctcgttgacggagcacaaagtacacctcacatgaaagtggatgtgcaggatctggactgcgatttctttgccttttcaggacataagatgtgtgggccgaccggaatcggggtattgtatggaaagcagaccttactggaacaaatggaacctgtcgaattcggcggagaaatgatcgatttcgttgatctttataattccagctggaaagagcttccgtggaagtttgaaggtggtacacccatcatagcaggagcagtgggacttgctgctgccatagattttcttgaagatatcggcatggaagtgatcgatgtttacgatcgcaaactagggacctacgcctacgaacgcctttcggaaattgagggactgactgtatacggtcctgtccggaacaggaccggggtgatcacctttaatcttggcgatgtgcatcctcatgatgtggctacagtcctggattcggaaggtgtcgctgtcagagcgggccaccattgctgtcagacgctgatgcgctggctggatgtaacggcaacggcccgggccagcttttatttgtataataccgaagacgacgtggaacgactggtaaaggcactactaaaaacaaaggagtactttggtcatgcaattggatga

SEQ ID NO: 680 - protein, 408 aa, Paenibacillus larvae
MIGAEIRKLFPILNQEMNGHPLVYLDNGATSQKPVSVLDALKKYYEWDNSNVHRGVHTLGSRATDAYEGARSKVVRFIHAKSEKEIIFTRGTTSSINLVASGYVRAHLHEGDEIVITPMEHHSNLIPWQQAAKATGATLKYIPLQPDGTISLEDVENTITERTRFVSVVHMSNVLGLVNPVKEIAAIAHRYGAEILVDGAQSTPHMKVDVQDLDCDFFAFSGHKMCGPTGIGVLYGKQTLLEQMEPVEFGGEMIDFVDLYNSSWKELPWKFEGGTPIIAGAVGLAAAIDFLEDIGMEVIDVYDRKLGTYAYERLSEIEGLTVYGPVRNRTGVITFNLGDVHPHDVATVLDSEGVAVRAGHHCCQTLMRWLDVTATARASFYLYNTEDDVERLVKALLKTKEYFGHAIG

SEQ ID NO: 681 - DNA, 1221 bp, Bacillus subtilis
atgaatatcacagatattcgtgaacagttcccgatccttcatcagcaagtgaacggacatgatctcgtttatctcgacagcgcggcgacttcccagaagccgcgtgctgtcattgaaacactggataagtattataaccaatacaattccaatgttcaccggggcgtccatacacttggaaccagagcgacagatggttatgaaggagcgcgtgaaaaagtccgcaagtttattaacgcgaagtcaatggctgagattattttcacaaaaggcacgaccacatcactgaatatggtggcgttaagctatgcgcgcgccaacctgaaacctggtgatgaagtggtcatcacctacatggagcatcatgcgaatatcattccgtggcagcaggctgtaaaagcaactggcgccacattaaaatatattccgttgcaggaagacggaacgatttctttagaagacgtcagagaaacggtcacaagcaacacaaaaattgttgcggtgtctcatgtatctaatgttctcggcacggtcaacccgattaaagaaatggcgaaaatcgctcatgacaatggggctgtcattgtggtggacggtgcacaaagcacgcctcacatgaaaattgacgtgcaggatctcgattgcgacttctttgcgctttcttcccataaaatgtgcggacctaccggtgttggtgtgctgtacggaaagaaagccctgctggaaaacatggagcctgccgaattcggcggtgaaatgatcgactttgtcgggctttatgaatcaacttggaaagagcttccgtggaaattcgaagcgggtacgccgattattgcaggagcaatcggcctcggtgccgccattgattttctcgaagaaatcggtcttgatgagatttcccgccatgagcacaagcttgcagcttatgcgcttgaacgcttccgccagcttgacggcgtaacggtttacgggccggaagagcgtgccgggcttgtcacatttaaccttgatgatgttcatccgcacgatgtggcgactgtgcttgatgcggagggaatcgcagtcagagccggccaccattgtgcgcagccgctgatgaaatggctggatgtaactgctactgcaagagcaagcttttatctgtataatacagaggaagagattgataagcttgtggaagctcttcaaaagacaaaggagtattttacaaatgtcttttaa

SEQ ID NO: 682 - protein, 406 aa, Bacillus subtilis
MNITDIREQFPILHQQVNGHDLVYLDSAATSQKPRAVIETLDKYYNQYNSNVHRGVHTLGTRATDGYEGAREKVRKFINAKSMAEIIFTKGTTTSLNMVALSYARANLKPGDEVVITYMEHHANIIPWQQAVKATGATLKYIPLQEDGTISLEDVRETVTSNTKIVAVSHVSNVLGTVNPIKEMAKIAHDNGAVIVVDGAQSTPHMKIDVQDLDCDFFALSSHKMCGPTGVGVLYGKKALLENMEPAEFGGEMIDFVGLYESTWKELPWKFEAGTPIIAGAIGLGAAIDFLEEIGLDEISRHEHKLAAYALERFRQLDGVTVYGPEERAGLVTFNLDDVHPHDVATVLDAEGIAVRAGHHCAQPLMKWLDVTATARASFYLYNTEEEIDKLVEALQKTKEYFTNVF

SEQ ID NO: 683 - DNA, 1221 bp, Bacillus licheniformis
atgaatgctaaagatattcgcgaacagtttccgattctcagccaacaggtcaacggacacgatctcgtttatttggacagcgcggccacctcgcaaaagccgcgcgtcgtcattgagacgcttgatgagtattacaactcttacaattccaatgtccatcgcggcgtccatacattaggaacaaaagcaacggatggatatgaaggagcacgtgagaaggtcaggaagtttataaacgcgaaatcgatgcaggaaattattttcacaaggggtacgacaacggccctgaacacggttgcgctcagctatgcccgcgcaaaccttaagcccggtgatgaaatcgtcattacaccgatggagcaccatgcgaatattattccgtggcagcaggctgtcaaagcaaccggcgccacgctgaagtacattccgcttcaggaagacggcaccatttccttggacgatgtcagggaaacggtgacggaaaatacaaaaatcgtctctgcagcgcatgtttcaaacgttctcggtacgatcaacccgattaaggaaatggccaaaatcgcccacgaacacggcgcggtcatggtcgtagacggtgcgcaaagcacgccgcacatgaaaattgacgtccaggatttggactgcgatttctatacgttttcagcccacaaaatgtgtggtccgaccggaatcggggtattgtatggaaaaaaagcattgcttgaaaacatggaacctgcagaattcggcggagaaatgatcgattttgtcggtctttacgaatcgacttggaaggagctgccttggaaattcgaagccggcacaccgatcattgccggcgcgatcggattgggagcggcgattgacttccttgaagacatcggacttgatgaaatattagcgcatgaacaccgtttggcggcatacgcgctggagcgctttaaagagcttgaaggcgctgttgtctatggtccggccgaacgtgcaggactcgtgacgttcaaccttgaagacgttcatccgcacgatgtggcaaccgtgctggatgcagaaggggtcgccgtcagagccggccatcactgcgcgcagcctttaatgaaatggctgaacgtctccgccactgcaagagcgagcttttatctgtataatacggaagaagacatcgacaaactgattgaagctcttcagaagacaaaggagtatttcacaaatgtcttttaa

SEQ ID NO: 684 - protein, 406 aa, Bacillus licheniformis
MNAKDIREQFPILSQQVNGHDLVYLDSAATSQKPRVVIETLDEYYNSYNSNVHRGVHTLGTKATDGYEGAREKVRKFINAKSMQEIIFTRGTTTALNTVALSYARANLKPGDEIVITPMEHHANIIPWQQAVKATGATLKYIPLQEDGTISLDDVRETVTENTKIVSAAHVSNVLGTINPIKEMAKIAHEHGAVMVVDGAQSTPHMKIDVQDLDCDFYTFSAHKMCGPTGIGVLYGKKALLENMEPAEFGGEMIDFVGLYESTWKELPWKFEAGTPIIAGAIGLGAAIDFLEDIGLDEILAHEHRLAAYALERFKELEGAVVYGPAERAGLVTFNLEDVHPHDVATVLDAEGVAVRAGHHCAQPLMKWLNVSATARASFYLYNTEEDIDKLIEALQKTKEYFTNVF

SEQ ID NO: 685 - DNA, 1224 bp, Oceanobacillus iheyensis
atggatgtaaatgccattaaacaacaatttccgattttaaatcaagaagtaaatggacatccacttgtatacttggattcctctgcaacatctcaaaaaccgctttcggttattgaagcggtaaatgcgtactacagagagaataattccaatgtacaccgtggtgttcatactcttggtacaagagcaacagatcaatatgagggatcaagagaaaaggttcgatcatttattaatgcgaacagtacaaaagagattatttttacaagagggactactacttccattaatatcgtagcatcaagctatgctagaatgaatgttggtcctggtgatgaaatagttatcacccaaatggagcaccatagtaatctaattccttggcaacaagttgctaaagcaacaggagcatcgttggtgtacttacctcttcaagaggatggtactattacaattgaagatgcgaagaagacgattacagatcagacaaaaattgttgccatggcacatgtttctaatgtgctaggttcaattaatcctattaaagaaattgctgctattgcgcatcaacatgatgcaattatggtagtcgatggtgcgcaaggtgcacctcatatgaaagtggatgttgaagatctagattgtgacttttatgcattctctggtcataaaatgtgtggtcctactggaatcggagtattatatggaaagcagcatttattagaaaacatggagcctattgaatttggcggagaaatgattgattttgtaaatctttatgactctacatggaaagaacttccttggaaattcgaaggcgggacaccaataattgctggagcaattggactcggtgctgcaattgatttcctagaaaatataggatatcaagaaattgtcaatcatgaaaatgaattggcagcacacgctttaaagcaaatgcgtacaattgatggaatttccatatatggacctgaacaaagggctgggctagtaacatttaatctagatgatgtacatccacacgatactgctactgtactagatgcagaaggaatcgcagtacgtgctggccatcattgtgctcaaccattaatgaagtggttgaatgtttcagcgacggctagagcaagtttctacctttataattcaaaagaagatgtagatcgattggtagaaggactgttaaaaacaaaggagtattttgggaatgtctttgaataa

SEQ ID NO: 686 - protein, 407 aa, Oceanobacillus iheyensis
MDVNAIKQQFPILNQEVNGHPLVYLDSSATSQKPLSVIEAVNAYYRENNSNVHRGVHTLGTRATDQYEGSREKVRSFINANSTKEIIFTRGTTTSINIVASSYARMNVGPGDEIVITQMEHHSNLIPWQQVAKATGASLVYLPLQEDGTITIEDAKKTITDQTKIVAMAHVSNVLGSINPIKEIAAIAHQHDAIMVVDGAQGAPHMKVDVEDLDCDFYAFSGHKMCGPTGIGVLYGKQHLLENMEPIEFGGEMIDFVNLYDSTWKELPWKFEGGTPIIAGAIGLGAAIDFLENIGYQEIVNHENELAAHALKQMRTIDGISIYGPEQRAGLVTFNLDDVHPHDTATVLDAEGIAVRAGHHCAQPLMKWLNVSATARASFYLYNSKEDVDRLVEGLLKTKEYFGNVFE

SEQ ID NO: 687 - DNA, 1230 bp, Bacillus coagulans
atggatatcaatgaagttcgccggcagtttcccatattggaccaggaagtaaacggccacccgcttgtttatttagacagtgctgcgacttcacaaaagccgctccgtgtcattgaagccgtcaaccaatactaccgtgaatataattcgaacgttcaccgcggcgtccatacgcttgggacaaaagcgactgaccattacgaaggcgcgcgcgaaaaagtccgcaaatttatcggtgccgaatcaacggaagaaatcatttttacaaaagggacgacagccgggctgaaccttgttgcccacagtttcggcgatgcacaagtgcaggaaggcgatgagatcgtcattacctacatggagcatcacagcaacctcatcccgtggcagcagctcgccaaaagaaaaggcgccgttttgaaatatgtgccgatgcaaaaaaacggtacgctgcgacttgaagatgtggaaaaaacggttacggagcggacgaaaatcgtggctgcagcgcttgtctcaaacgtgcttggcaccattaacccggtaaaagacatagcgaaaatcgcacacagccatggtgcttacatggtcgtcgatgccgcccaaggtgcgccgcatatgcaagtggacgtaagggatcttgactgcgactttcttgctttctccggtcacaaaatgtgcggtccgaccggcgtcggcgtcctgtacggcaaaaaggcgctgcttgaagagatggaaccgctcgaatacggcggcgaaatgattgattttgtcggcctgtacgattccacctggaaagaacttccgtggaagtttgaaggcggcactccggtgattgccggtgcaatcgggctcggggaagccatcgattttctcgaagaaatcgggcttgatgaaattacggcgcatgaacaggatttaagtgcctattgcctcagtcagttttctgaaatagaagggattacggtgtacggcccggaaagcgcagacgaacgcgccggccttgtgacgtttaatttagaaaacgtgcatccgcatgatgccgcgaccatcctcgatgcggaaggcattgcgatccgcgcgggccaccattgcgcacagccgttgatgaaatggctggacgtgacagcgaccgcacgtgcaagcttttatttatacaatacgaaagaagatattgacaaacttgttgccggtatcgtgaaagcaaaggagtattttacaaatgtcttctaa

SEQ ID NO: 688 - protein, 409 aa, Bacillus coagulans
MDINEVRRQFPILDQEVNGHPLVYLDSAATSQKPLRVIEAVNQYYREYNSNVHRGVHTLGTKATDHYEGAREKVRKFIGAESTEEIIFTKGTTAGLNLVAHSFGDAQVQEGDEIVITYMEHHSNLIPWQQLAKRKGAVLKYVPMQKNGTLRLEDVEKTVTERTKIVAAALVSNVLGTINPVKDIAKIAHSHGAYMVVDAAQGAPHMQVDVRDLDCDFLAFSGHKMCGPTGVGVLYGKKALLEEMEPLEYGGEMIDFVGLYDSTWKELPWKFEGGTPVIAGAIGLGEAIDFLEEIGLDEITAHEQDLSAYCLSQFSEIEGITVYGPESADERAGLVTFNLENVHPHDAATILDAEGIAIRAGHHCAQPLMKWLDVTATARASFYLYNTKEDIDKLVAGIVKAKEYFTNVF

SEQ ID NO: 689 - DNA, 1242 bp, Staphylococcus aureus
gtggccgaacactcatttgacgttaatgaagtaatcaaggattttccgatattagatcaaaaagtcaatggcaaacgtttagcatatcttgattcaacagcgacaagtcaaacgcctatgcaagtgttaaatgttttagaggattactacaagcgttataattcaaacgttcatcgtggtgttcatacattaggatcattggcaactgatggttatgaaaatgcccgtgaaaccgttcgtcgttttattaatgcgaagtattttgaagaaatcattttcacacgcggaacaactgcgtcgattaaccttgtagcacatagctatggtgatgcaaatgttgaagagggcgatgaaattgttgtcactgaaatggagcatcatgccaatattgttccttggcaacagttagcaaagcgtaaaaatgcgacattgaaatttataccaatgacagctgacggtgaattaaacatcgaagatattaagcaaacgattaatgataaaacaaagatcgttgctattgcacatatttctaatgtactcggtacaattaatgatgttaaaaccattgcagaaatagctcatcaacatggcgcaattatcagtgttgatggggcgcaagcagcaccacatatgaaacttgatatgcaagaaatgaatgctgatttttatagttttagtggtcataaaatgcttggaccaacaggtattggcgtattatttggtaaacgtgagttactacaaaaaatggaaccgattgagttcggtggtgacatgattgattttgtaagtaagtatgatgcaacatgggctgatttacctactaaatttgaggcgggtactccattaattgctcaagcaattgggcttgcagaagctattcgctatttagaacgcataggttttgatgcaattcataaatatgaacaagaattaacgatatatgcttatgagcaaatgtctgcaattgaaggaattgaaatttatggcccgcctaaggatcgtcgtgcaggtgtaataacgtttaatttacaagatgtacatccacacgatgttgctacagccgtagatacagaaggtgtagcggttagagctgggcatcattgtgcgcaaccgttaatgaaatggttaaatgtgtcttcaacagctagagcgagtttttatatatacaacacgaaagaagacattgatcagttaataaatgccttgaaacaaacgaaggagtttttctcttatgaattttaa

SEQ ID NO: 690 - protein, 413 aa, Staphylococcus aureus
MAEHSFDVNEVIKDFPILDQKVNGKRLAYLDSTATSQTPMQVLNVLEDYYKRYNSNVHRGVHTLGSLATDGYENARETVRRFINAKYFEEIIFTRGTTASINLVAHSYGDANVEEGDEIVVTEMEHHANIVPWQQLAKRKNATLKFIPMTADGELNIEDIKQTINDKTKIVAIAHISNVLGTINDVKTIAEIAHQHGAIISVDGAQAAPHMKLDMQEMNADFYSFSGHKMLGPTGIGVLFGKRELLQKMEPIEFGGDMIDFVSKYDATWADLPTKFEAGTPLIAQAIGLAEAIRYLERIGFDAIHKYEQELTIYAYEQMSAIEGIEIYGPPKDRRAGVITFNLQDVHPHDVATAVDTEGVAVRAGHHCAQPLMKWLNVSSTARASFYIYNTKEDIDQLINALKQTKEFFSYEF

SEQ ID NO: 691 - DNA, 1248 bp, Staphulococcus saprophyticus
gtgaataatttgactgatacattaaatgttactgaaattataaaagattttccgattctcaaccaacaagtgaatggaaaaagattagcgtatttagatacaacggccactagccaaacgcctgttcaagtgattgatgttatggcggattattacaaacgttataactcaaatgtgcatcgtggtgttcacacacttggttcattagcaacagatggttacgagagtgcacgtgaaacagtcagacgtttcattaatgctaaatattttgaggaagtcatttttacaagaggtacaacggcttctattaatattgttgcacatagttatggtgacgcacatgtttctgaaggtgatgagattgttgttactgaaatggaacatcatgcaaatattgtgccgtggcaacaattagctaaacgtaaaaatgcacatttgaaatttataccaatgactgaagatggacaattagcgttagaagatgttaaggcaacaatcaatgataatacgaaaattgttgcgattgcacatgtttctaatgtcttaggtacgattaatgatattaaagcaattactgaaatcgcacaccaacacggtgcaattatcagtgttgatggtgcacaagctgcgcctcatatggcactagatatgcaagcgttagatgtcgatttctatagctttagtggccataaaatgctagggccaacaggtattggtgttctgtatggtaaacgtacgctacttaataaaatggagcctaccgaattcggcggtgacatgatagattttgtaagtaagtacgatgcttcatgggcagatttaccgactaaatttgaagctggtacaccattaattgcacaggcaattggtttggccgaagcaattagatatttacaaaatattggcttcgaagcgattcatcaacatgaatcagaattaactgcatacgcttatgataaaatgtcagaagtagatggtattgaaatttatggacctgccaaagacaaacgtgcaggtgtcattacttttaatatggttgatgttcatgcacatgacgttgcgactgcagtagatactgaaggcgtagcagtaagagcaggacatcattgtgcacaaccacttatgaaatggttaaaccaatcttctacagcgcgtgcaagtttttacatttataacacgaaagaagatattgaccaattcgttgaagcattgaaacaaacgaaggagtttttctcatatgaattttaa

SEQ ID NO: 692 - protein, 415 aa, Staphulococcus saprophyticus
MNNLTDTLNVTEIIKDFPILNQQVNGKRLAYLDTTATSQTPVQVIDVMADYYKRYNSNVHRGVHTLGSLATDGYESARETVRRFINAKYFEEVIFTRGTTASINIVAHSYGDAHVSEGDEIVVTEMEHHANIVPWQQLAKRKNAHLKFIPMTEDGQLALEDVKATINDNTKIVAIAHVSNVLGTINDIKAITEIAHQHGAIISVDGAQAAPHMALDMQALDVDFYSFSGHKMLGPTGIGVLYGKRTLLNKMEPTEFGGDMIDFVSKYDASWADLPTKFEAGTPLIAQAIGLAEAIRYLQNIGFEAIHQHESELTAYAYDKMSEVDGIEIYGPAKDKRAGVITFNMVDVHAHDVATAVDTEGVAVRAGHHCAQPLMKWLNQSSTARASFYIYNTKEDIDQFVEALKQTKEFFSYEF

SEQ ID NO: 693 - DNA, 1227 bp, Paenibacillus sp.
atgaatatagaagcggtaagggagcaattcccgatactgcatcagcaggtaaacgggcatccgctcgtttacctcgacagcgcggcgtcttcccagaagccgcgttccgtcattgatgcggttagtcgttattacgaactggatcactccaatgtgcaccgcggcgttcatacccttggttcaagggcgacggatgcttacgaaggcgcacgggagaaggtagccaagtttctgaatgcgaagtcggcggaagagatcgtgtttacacgaggtacaacgacggcgcttaacctagtcgcatcgagttatgcccgcagcgtttgcaaagaaggcgatgagatcgtcattaatcagatggagcatcatgccaactttattccatggcagcaggcagccaaagcgacgggagcgactttgaagtttatccctcttcaaccggatggcacgatttcgctggcagatgcggagcagaccattacgccaaatacgaaggttgtcgcgatgacatacgtatccaacgtgcttggcgtcgtaaatccgattaaggaaattacggctatcgcccatcgcaacggtgcagtcatggttgtagacggtgcgcaaagcacgccgcacatgaaggtggacgtacaggatctggactgcgatttctacggattatccggtcacaagatgtgcggcccgaccggtattggcgctttgtacggcaagaaagaactgttgtcgaacatggagccgatcgagtacggcggcgagatgatcgactttgttgatttgtatgaatccacttggaaagaagcgccgtaccgcttcgagggcggtacgccgattattgcgggcgctgtgggactaggcgctgcgatcgatttcctggagcagataggtatcgatgagattgataagcatgagagaaaaatggcagcctacgcgtatgataaattgtccacgatcgatgatattacgatctacgggccaaaagcgaaccgcgttggtctggttaccttcaatctcggggacattcatcctcatgacgtatcgacagtacttgattcttacggcattgcgattcgagcaggccatcattgctgccagccgctgatgcgctggctgaatgtttcggcaacggcgagagcaagcttttatctatacaataacgaggaagagattgaccgcttggcggaaggtctcatccggacaaaggagttcttcggggatgcaattggatga

SEQ ID NO: 694 - protein, 408 aa, Paenibacillus sp.
MNIEAVREQFPILHQQVNGHPLVYLDSAASSQKPRSVIDAVSRYYELDHSNVHRGVHTLGSRATDAYEGAREKVAKFLNAKSAEEIVFTRGTTTALNLVASSYARSVCKEGDEIVINQMEHHANFIPWQQAAKATGATLKFIPLQPDGTISLADAEQTITPNTKVVAMTYVSNVLGVVNPIKEITAIAHRNGAVMVVDGAQSTPHMKVDVQDLDCDFYGLSGHKMCGPTGIGALYGKKELLSNMEPIEYGGEMIDFVDLYESTWKEAPYRFEGGTPIIAGAVGLGAAIDFLEQIGIDEIDKHERKMAAYAYDKLSTIDDITIYGPKANRVGLVTFNLGDIHPHDVSTVLDSYGIAIRAGHHCCQPLMRWLNVSATARASFYLYNNEEEIDRLAEGLIRTKEFFGDAIG

SEQ ID NO: 695 - DNA, 1230 bp, Lactobacillus salivarius
atgatgaagaaaactagtgatttaagaaaagattttcctcttttagaaactaaaatgaacgatcagcctttaacttacttagatagtgcagctacttcgcaaaagcctaagcaagtgattgacgaaattgctgactactataataaatacaatagtaatattcatcgcggtgtctacaatttagcagtcgaaacaactgataaatatgaaaatgtaagacataaagtggcaaattttattaatgcttatcgtgatgaggaagttctttttactaagggaacaactcaaagtttgaactggatagcacaaggttatgttagatataacttacatgaaggcgatgaaattgttaccacctatatggagcatcacagtaacattgttccatggcaagcaattgcacaagaaaagaatctaaaggtaaagtatataactttaactgaagaaggcaaacttgatttagacgatttaaagcaaaaggttactgataaaacaaagattgtagcagttactcatgtttctaacgttttaggaacaattaatccaattaaagaaattgcagctattgttcatcaaagtaatgcaattttagtagttgatggtgctcaatctgtgccacatttaccagtagatatgcaagatttagaagcagacttttatgtattttctggccataagatgctaggacctactggaattggtgttctctggggaaagtatgaactcttagaaaaaatgcatcctttagaatatggtggagaaatgattgacagtgtaacaactgaaaaatcaacattcaaagtgattccttggaattttgaaggtggaacacaaaatattgaaggcgtactaggtcttggtgctgcgattgattatttagaagaaatcggaatggaaaatgtggctcgaaacgataaggacttacaaaagtatgcactcgaaaagttagctaatatcaagtctattgaattttatggtcctaaagatcctaatcaaagatgtggagtagtatcctttaatttgaaaggtattcatcctcatgatgtagcaacttttttagatgctgatggaattgcagttagagctggtcaccattgtgcacaaccacttatggattggttaggtgtgagtgctactttgagagcaagtttctatttttataatacttatgaagaaatcgacaaattagtagattctctaaagaaagtagaggaatttttccaaatatga

SEQ ID NO: 696 - protein, 409 aa, Lactobacillus salivarius
MMKKTSDLRKDFPLLETKMNDQPLTYLDSAATSQKPKQVIDEIADYYNKYNSNIHRGVYNLAVETTDKYENVRHKVANFINAYRDEEVLFTKGTTQSLNWIAQGYVRYNLHEGDEIVTTYMEHHSNIVPWQAIAQEKNLKVKYITLTEEGKLDLDDLKQKVTDKTKIVAVTHVSNVLGTINPIKEIAAIVHQSNAILVVDGAQSVPHLPVDMQDLEADFYVFSGHKMLGPTGIGVLWGKYELLEKMHPLEYGGEMIDSVTTEKSTFKVIPWNFEGGTQNIEGVLGLGAAIDYLEEIGMENVARNDKDLQKYALEKLANIKSIEFYGPKDPNQRCGVVSFNLKGIHPHDVATFLDADGIAVRAGHHCAQPLMDWLGVSATLRASFYFYNTYEEIDKLVDSLKKVEEFFQI

SEQ ID NO: 697 - DNA, 1224 bp, Exiguobacterium sibiricum
atgggaatcgatgcatccatccgcaatcagtttccgattcttgaccaacaggttaatgaccggaaactcgtctatttagatagtgcggcttcgtcacaaaagccgctcgtcgtcattgaggcgattgagaactactacaagacggttcattcgaatgtgcaccgtggcgtccatacgctcggaacacgagcgacggatgcgtacgaaggtgcgcgtgagaacgtacgtcgtttcatcaaggcgcaacaccatgaagagattatctttacccgcgggacgacgacagcgatcaatatcgtcgcctcaagttacggaatggagcatgtcgaagaaggagacgagattgtcgtcacgtatctcgaacatcatgcgaatctcattccgtggcaacaggtcgcaaaaaagaaaaaagcgaaactgaaatatgtggatttgacggcagacggtcgtgtaacgattgaagcggtcaaagaacaaatttcggatcggacgaagattgtggcaatggcccacgtttcgaacgtccttggaaccatcaatccgattaaagaagtcacgcaacttgcccatgctgccggcgccgtcatggtcgtcgatgcagcgcaaagcgcgccgcatcaacagattgatgttacggatctcgattgtgatttcctggcgttttcggcccataagatgtgcggaccgaccgggatcggcgtcctgtacggcaaaaaagcattgctcaatgcgatggagccagtcgaattcggtggtgagatgattgattacgtcgggctggaagagtcgacgttcaaaccatctccgtaccggttcgaagcagggacaccaatcattgccggcgcagtcggcttatcggcagcgattgatttcttggaacaagtcggactcagtaacatcgaagcccacgaacgtgagctcgctcagtatgcgatggcacaaatgcgtgacatcgaaggactgacgatttacggtccggaagaacgtgttggtctcgtcacctttaatctcggtgatgttcacgcgcatgatgtcgcgacggttctcgatatgcaaggtatcgcagtccgtgccggtcaccattgcgcgcaaccgctgatgcgctggcttggagccagttctacggcacgagccagcttctacctgtataatacaaaggaagaagtagacgcattagtgacaggacttcgccaaacgaaggagtatttcagtcatggattttaa

SEQ ID NO: 698 - protein, 407 aa, Exiguobacterium sibiricum
MGIDASIRNQFPILDQQVNDRKLVYLDSAASSQKPLVVIEAIENYYKTVHSNVHRGVHTLGTRATDAYEGARENVRRFIKAQHHEEIIFTRGTTTAINIVASSYGMEHVEEGDEIVVTYLEHHANLIPWQQVAKKKKAKLKYVDLTADGRVTIEAVKEQISDRTKIVAMAHVSNVLGTINPIKEVTQLAHAAGAVMVVDAAQSAPHQQIDVTDLDCDFLAFSAHKMCGPTGIGVLYGKKALLNAMEPVEFGGEMIDYVGLEESTFKPSPYRFEAGTPIIAGAVGLSAAIDFLEQVGLSNIEAHERELAQYAMAQMRDIEGLTIYGPEERVGLVTFNLGDVHAHDVATVLDMQGIAVRAGHHCAQPLMRWLGASSTARASFYLYNTKEEVDALVTGLRQTKEYFSHGF

SEQ ID NO: 699 - DNA, 1221 bp, Exiguobacterium sp.
atgttgaacgcctcgattcgtgaacagtttccgattttagatcaggaaatcaatggacacccgctcgtttatcttgatagcgcggcgagctcacaaaagccgatcgctgtcatcgaggcgatcgaggactattatcgtcgcaaccattcgaacgtgcatcgtggcgtccatacgctcgggacgcaagcgacggatgcgtatgaaggagcacgcgaacgcgtccgctcgttcatccatgcggcggttcctgaagaaatcattttcactcgtggaacgacgacggccatcaacttggtcgcatcgagctacggagatgcgaatgtcggtgaaggcgacgaaatcgtcctcaccccgatggaacaccatgcgaacttgattccgtggcaacaactcgctaaacgtaaaggcgcgacgcttcgatacgtcgagctcacgccggacggacgggtcacactggatgccgttcaagcggtgttatcggaccggacgaaaatcgtcgcgatgagccacgtctcgaacgtactcgggacgattaacccgattgccgaagtcgctcgactcgcgcatgaaaaaggtgctgtcatggtcgtcgatgccgcacaaagtgcaccgcatcgaaaattggacgtccaagcactcgactgtgacttcctcgccttttctggacataagatgctcggaccgactggaatcggtgtcttatatgggaagaaacaactcctcaaaaacatggagccggtcgagttcggtggcgagatgatcgactatgtcgatttgtatgaatcgacgtggaaagacatcccgtaccgtttcgaagcggggacaccgattatcgccggagcggtcggacttgcggctgccatcgactttttagaagaaatcggtcttgagaacgtcgaagcacacgaacgtgaactcgcgtcttacgcgattgaacagatgaaaacgattgaagggattgagatttacggtcctgaagatcgcgttggtctcgtcacgttcaacttgaaggacgtgcacgcgcacgacctcgcgaccgttctcgatatgcaaggcatcgcggttcgtgccggtcaccactgtgcacaaccactcatgcgtcttttgaagcaatcatcgacggcacgggcgagcttctatttgtacaacacaaaagaagaagtcgaccgcttcatcgagggattacgtcaaacgaaggagtatttcaattatgagttttaa

SEQ ID NO: 700 - protein, 406 aa, Exiguobacterium sp.
MLNASIREQFPILDQEINGHPLVYLDSAASSQKPIAVIEAIEDYYRRNHSNVHRGVHTLGTQATDAYEGARERVRSFIHAAVPEEIIFTRGTTTAINLVASSYGDANVGEGDEIVLTPMEHHANLIPWQQLAKRKGATLRYVELTPDGRVTLDAVQAVLSDRTKIVAMSHVSNVLGTINPIAEVARLAHEKGAVMVVDAAQSAPHRKLDVQALDCDFLAFSGHKMLGPTGIGVLYGKKQLLKNMEPVEFGGEMIDYVDLYESTWKDIPYRFEAGTPIIAGAVGLAAAIDFLEEIGLENVEAHERELASYAIEQMKTIEGIEIYGPEDRVGLVTFNLKDVHAHDLATVLDMQGIAVRAGHHCAQPLMRLLKQSSTARASFYLYNTKEEVDRFIEGLRQTKEYFNYEF

SEQ ID NO: 701 - DNA, 1227 bp, Rubrobacter xylanophilus
atgtacgacgtcctcaaggtgcggcgcgactttcccatcctcgagcgggaggtgaacggccgcccgctcgtctacctggacaacgcggcgacctcccagaagccgctgcaggtcatccggaccctctcccggtactacgagcggcacaacgccaacatccaccgcggcgtccaccgcctggccgaggaggccaccgggctctacgaggaggcgcgcggcaaggtggcccgctttatcggggctcccgacccccgcggcctcgtcttcacgcgggggaccaccgagtccataaacctcgtcgcccacgcctggggcagaaagaacctgcgcgagggcgacgaggtggtgctcaccgaggccgagcaccactccaacctggtgccctggcagctcgccgcgcgggacaccggcgcgaggcttcgcttcatcccggtcctggacgacggcacgctggacatggaggcggcggagcacctgatcgggccgcggacgcggctcgtgggctgcgtgcacgcctccaacgtgctcggcacggtcaacccggtggagcggctggcggagctggcgcacgaggcgggggccctgatgctggtcgacggggcgcagagcgcgccgcacctgccggtggacgtaacctctctgggctgcgacttcttcgcggcgagcgggcacaagatgctcgggccgaccggggtgggattcctgtgggcccgccccgagcttctcgaggagatggagccgttcctcggcgggggcgagatgatccgggaggtccgcctggagcgttccacctggaacgagatcccctacaagttcgaggccgggacgatgaacatcgcccaggcgatcgggctgggggccgccgtggactacctgggctccctggggatggagagcgtccgggagcacgagcggcgcctcggggcgtacgcctaccgccggctcgccggggtcgaggggatcaccctctacggcccggcggagaaccggacgggggtcgtggccttcaacctccccgaggtgcacccgcacgacctctcccagctcctggaccaggagggcgtcgccataaggagcggccaccactgctgccagccgctgatgcgccgcctcggggtggtggcgaccgcccgggccagcctctacctgtacaacacggaggaggaggtggaggcgctggtcgaggccatcgcccgcgcccgcgagttcttcgaggcgccggcatga

SEQ ID NO: 702 - protein, 408 aa, Rubrobacter xylanophilus
MYDVLKVRRDFPILEREVNGRPLVYLDNAATSQKPLQVIRTLSRYYERHNANIHRGVHRLAEEATGLYEEARGKVARFIGAPDPRGLVFTRGTTESINLVAHAWGRKNLREGDEVVLTEAEHHSNLVPWQLAARDTGARLRFIPVLDDGTLDMEAAEHLIGPRTRLVGCVHASNVLGTVNPVERLAELAHEAGALMLVDGAQSAPHLPVDVTSLGCDFFAASGHKMLGPTGVGFLWARPELLEEMEPFLGGGEMIREVRLERSTWNEIPYKFEAGTMNIAQAIGLGAAVDYLGSLGMESVREHERRLGAYAYRRLAGVEGITLYGPAENRTGVVAFNLPEVHPHDLSQLLDQEGVAIRSGHHCCQPLMRRLGVVATARASLYLYNTEEEVEALVEAIARAREFFEAPA

SEQ ID NO: 703 - DNA, 1227 bp, Clostridium acetobutylicum
atgaataataagtatataaaagacttccctaccttagaccaagagtttaatggtcataagtttgtttatcttgacaatgctgctactactcaaaagcctctttctgtaataaatgcagtaaatgactactacagaaaatcaaatgcaaaccctcatagaggagcctatgctttaagcgttaaggctaccgacttatatgaaggagcaagagatgttgttaaggattttataaatgcaaataagagtaaagaaattgtattcgtaagaaatgctactgaagcacttaacttagtagcatattcttacggacttaactttataaatgctggtgatgaaattgtaatatctattgcagaacatcactcaaaccttgttccttggcagcaggttgcaaaagcaaagggtgctgtacttaagtatttgtatcttaatgaagacggaataattccacatgaagaatttgaaagtaaaataacttcaaaaactaaaatagtttcagtaactcacgtttcaaatgttcttggaaccataaatcctgttaacgacataataaagaaagcgcatagcgtaggagctattgcaatccttgatgcagctcagagcatacctcacatggaggttgatgttaaagctttagatgctgattttgtagtattctcaggccataaaatgctagcaccaatgggcataggtgttttatacggaaaagaagctcttttagaaaaaatgcctccttttatgtttggtggagatatgatagaatacgtttgggaacagaaaacaacctttgctgaggttcctcataaattcgaaggtggtacacaaaatgtaggtggtgccgtaggtttaactgctgccatagaatacttaaacaaagtaggtttagataaagtatatgctatagaaaaggaacttactgcatatgcactagaaagactttctgaactaccatatgtaaaagtttatggaacaaaggatgcttctaaaaaagccggtgttatatcttttaacgtggatgatgttcatcctcatgatgtagctacaatacttgattcatatggtgttgcaataagaactggtcatcactgtgcaaatcctcttatgaggtatatggatgtaaatgcaacctgcagagctagcttctatttttataacacaagagaagacgtagatgccttagtagagggattaaaaaatacaaggaagtggttaggttatggatcttaa

SEQ ID NO: 704 - protein, 408 aa, Clostridium acetobutylicum
MNNKYIKDFPTLDQEFNGHKFVYLDNAATTQKPLSVINAVNDYYRKSNANPHRGAYALSVKATDLYEGARDVVKDFINANKSKEIVFVRNATEALNLVAYSYGLNFINAGDEIVISIAEHHSNLVPWQQVAKAKGAVLKYLYLNEDGIIPHEEFESKITSKTKIVSVTHVSNVLGTINPVNDIIKKAHSVGAIAILDAAQSIPHMEVDVKALDADFVVFSGHKMLAPMGIGVLYGKEALLEKMPPFMFGGDMIEYVWEQKTTFAEVPHKFEGGTQNVGGAVGLTAAIEYLNKVGLDKVYAIEKELTAYALERLSELPYVKVYGTKDASKKAGVISFNVDDVHPHDVATILDSYGVAIRTGHHCANPLMRYMDVNATCRASFYFYNTREDVDALVEGLKNTRKWLGYGS

SEQ ID NO: 705 - DNA, 1230 bp, Clostridium beijerinckii
atgaataatgtagattttttgaaggatttccctgttttgagggccaaccaaaatggggaaagattagtttatttagatagtggtgctacaactcaaaagcctgttcaagttttagaagctattgaaaactactataaagtaagtaatgcaaatcctcatagaggtgcttataagttaagtattgatgcaacaaaggcttatgatgacgctagagaaaagattagaagattcattgatgcggaattttcaaaagaaataatttttactaaaaatgcaacagaaggctttaatcttatagcatcttcttatggaatgaacaacattaatgaaggtgatgaaattgttatttcaattgcagagcatcattcaaaccttattccatggcagattgtagctagagctaaaaaagcaactttaaaatatatgtacgtaaatgaaaacggagaaattccagaagaagaaattaaagataagattactgaaaggactaaactagttagcataactcatgtttctaatgcacttggaactataaatccagtaaaagagattatagagtatgctcattcaaaaggtgctaaagtaattgtagatggatcacaaagcgtaccacatatgaaagtaagtgtaagagacttagatgcagattttttagtattttcaggacacaaacttttaggcccaatgggaattggcgtagtttacggcaagaaggagcttttggaaagcatgccaccatatatagttggtggagatatgattgaatatgtttatgagcaggaagcaacctttgcagaattgccatctaagtttgaaggtggtactcaaaatgttgaaggtgctgtagggcttgcagcagctattgattatctagaaaatataggcatgaaaagaatagatgaaatagaaatggaacttacaagttatgcacttgaaaaattccaagagctgccttatataaagctatatgggcctaaggatttaagccatagaggtggaataatttcatttgacatagagggagttcatcctcatgatgttgcttcagtttttgattctcatggcgttgcaataagatcaggcaatcattgtgctcagccattaatgagatatatgggtattaatgcaacctgcagagctagtttttatttttataatacaaaagaagatgtagacaaattgattgaagcaacaaagaaaacatatgaaatgtttttgaaatggaggtaa

SEQ ID NO: 706 - protein, 409 aa, Clostridium beijerinckii
MNNVDFLKDFPVLRANQNGERLVYLDSGATTQKPVQVLEAIENYYKVSNANPHRGAYKLSIDATKAYDDAREKIRRFIDAEFSKEIIFTKNATEGFNLIASSYGMNNINEGDEIVISIAEHHSNLIPWQIVARAKKATLKYMYVNENGEIPEEEIKDKITERTKLVSITHVSNALGTINPVKEIIEYAHSKGAKVIVDGSQSVPHMKVSVRDLDADFLVFSGHKLLGPMGIGVVYGKKELLESMPPYIVGGDMIEYVYEQEATFAELPSKFEGGTQNVEGAVGLAAAIDYLENIGMKRIDEIEMELTSYALEKFQELPYIKLYGPKDLSHRGGIISFDIEGVHPHDVASVFDSHGVAIRSGNHCAQPLMRYMGINATCRASFYFYNTKEDVDKLIEATKKTYEMFLKWR

SEQ ID NO: 707 - DNA, 1263 bp, Clostridium kluyveri
atgaatggtttagatgcaaaaataacaaatataaatgtaaaaaaaataagagaggattttcctatactatctataaaagtgaatggaaatgatttagtatatttagataatggtgccacaactcaaaaaccaatacctgtgataaaagctgttgaaaactataatgaaaattataatggaaatcctcatagaggtgctcactatttgggaatcacatccacagaagcctatgagggagcccgtgaaaaagtaagagaatttataggagcaaaaaaatgctctgaaataatatttacaagaaatgctacagagtctctcaacttgatagcgtatacctacggtataaattttataaacaaaggggatgaaatagtaattcctatatcagaacatcatagtaatatacttccctggcaaatgatatcaagggccaaaggtgcagtactcaaatatatgtatactgataaaaatggtagactaactgaagaagagtataaaagtaaaattacagataaaacaaagcttgtttccattgcacagatgtccaatgtacttggaacaaaatatccagttaaagaaattgcaaaatatgctcatgaaaaaggagctgtggttatagtggatggagcccagagtgccccccatatgaaagtagatgtgtgtgatattgatgtagatttttttgtgttctcaggtcataaaatgttgtcttccatggggattggagtactttatggaaaagaagaacttctgctaaaaatgccgccttttttaagaggaggggatatgatagaatatgtcacagaacaggaagctacttttgcagaacttccatataagtttgaagcaggaactcaaaatgtagaaggagctgtgtctattggagcagctattgattatttaaattcaataggacttgataagattgaagcatatgaaaaagaacttacagaatatacacttgaaaaaatcagtgaaatagagtatgttacagtatatggagctaaagatacagaacataggggaggaattatttccttcaatgtaaaagatgtgcatcctcatgatgtgtcaacaatattaaataattacggagtggcaataagagcaggacatcactgtgcacagccccttatgaaatatttaggtatacaatcatcttcaagagctagtttctatttctataatacctatgaagaaatagataaatttatagaaggtcttaggcaggtaaggaagtggttaggatatggacgatcttaa

SEQ ID NO: 708 - protein, 420 aa, Clostridium kluyveri
MNGLDAKITNINVKKIREDFPILSIKVNGNDLVYLDNGATTQKPIPVIKAVENYNENYNGNPHRGAHYLGITSTEAYEGAREKVREFIGAKKCSEIIFTRNATESLNLIAYTYGINFINKGDEIVIPISEHHSNILPWQMISRAKGAVLKYMYTDKNGRLTEEEYKSKITDKTKLVSIAQMSNVLGTKYPVKEIAKYAHEKGAVVIVDGAQSAPHMKVDVCDIDVDFFVFSGHKMLSSMGIGVLYGKEELLLKMPPFLRGGDMIEYVTEQEATFAELPYKFEAGTQNVEGAVSIGAAIDYLNSIGLDKIEAYEKELTEYTLEKISEIEYVTVYGAKDTEHRGGIISFNVKDVHPHDVSTILNNYGVAIRAGHHCAQPLMKYLGIQSSSRASFYFYNTYEEIDKFIEGLRQVRKWLGYGRS

SEQ ID NO: 709 - DNA, 1197 bp, Lactobacillus casei
atgcgtgaacaatttccattttttaaagctcatcccgagctggtctatctagatacggcggcgacttctcagaaaccgcaagctttactagatgctattcaaaattactatgtcaatgataatgccaatgttcatcgtggcttgtataaattggcttatgacaccaccgaggcttatgaaaacgtacgccaacaagtggccggctttttaggtgcggcgagtgctgacgagattatttttactcgcgggaccactgatagcttgaacttggttgctagtgcttatgggccgcaagtcgtcgcggctgggtcacaaattgttgtgacgggtgcagagcatcacagtaatttcattccttggcagcaattagccaagcgccagcaggctacgttcacagtgacgccggtaaagccggatggcacggtggatattgctgccttattagcggccatcacgcctcagacgaaggtggttgcggtggcgcaagtgacgaatgttgcaggtgatacgttaccgattgccaaaattgcggccaaagcccatgcagttggtgctgttgtcgttgttgatggcgcgcaggcggtagcccatctggcagttgatgttcaagctatgggggcggatttctatgcattttctgggcataaaatttatggcccaactggcattggcgccctctatggccgcgctgatttattgcagcacatgccgccgattcagtttggcggtgaaatgatttcagaagtccgcgatgatgtcagtacttgggcagacggcccaattaagtatgaggctggcacgccgcacattgctggcgtgatcggattaggcgctgctttaacgtggtttaatcagtctgtgaatgcagcagcatttgacaacgaacatcaattggcagatcagttacgcgctggcttggcagcgattccagatgtgaccgtgtatggtaatcaagcaagtttggcgactgtgtcgtttaacttaactgggattcacccgcatgatcttgcgactttcttagatgagcagcaaattgcggttcgtgcggggcatcattgtgcacaaccgctgatggcgcgactaggggtgccagctacggttcgtgctagtttcggcgtttacaacaatgctgacgatgttgaacgattgattcaggcagttcaggcggcaaggaggtatttccatggcattgactaa

SEQ ID NO: 710 - protein, 398 aa, Lactobacillus casei
MREQFPFFKAHPELVYLDTAATSQKPQALLDAIQNYYVNDNANVHRGLYKLAYDTTEAYENVRQQVAGFLGAASADEIIFTRGTTDSLNLVASAYGPQVVAAGSQIVVTGAEHHSNFIPWQQLAKRQQATFTVTPVKPDGTVDIAALLAAITPQTKVVAVAQVTNVAGDTLPIAKIAAKAHAVGAVVVVDGAQAVAHLAVDVQAMGADFYAFSGHKIYGPTGIGALYGRADLLQHMPPIQFGGEMISEVRDDVSTWADGPIKYEAGTPHIAGVIGLGAALTWFNQSVNAAAFDNEHQLADQLRAGLAAIPDVTVYGNQASLATVSFNLTGIHPHDLATFLDEQQIAVRAGHHCAQPLMARLGVPATVRASFGVYNNADDVERLIQAVQAARRYFHGID

SEQ ID NO: 711 - DNA, 1230 bp, Thermoanaerobacter pseudethanolicus
gtgaaaaatatcgacattgaaagaataaaaaaagactttcctatattgagtgttaagccccatggaaaaaggcttgtatatcttgacaatgctgccacaactcaaaagccaattgaagtaataaaggctatggataaatattatgaagagctaaatgccaatgtgtacagaagcccccattatttaagtgtactttcaacacaagcctatgaagaggcaagagaaagggtaaaaaaatttataaacgccaaaaaagaagagtctatagttttcacaagaaatacaacagagtctataaactttatagcctacacttggggtatgaagcatataaacgaaggagacgaaatactacttaccatagctgaacaccacagtaatatactcccatggcagatggtagcagaagctaaaggggcaaagcttaaatatgtctatcttgatgaaaattttaggctttctatgaaagatttcaaagaaaaaatgtctgaaaaagtaaaattagttgctgtgcaacacatgtcgaatgttttgggaataataaatcctgtggaggagattacacatattgcccacaaatacggcgcaaaagtgttaatagatggagcacaaagtgtacctcatatgcctgttgatgtacaaaagatagattgtgacttttttgccttctctggtcacaagatgttaggacctatggggattggggttttatatataaaagaagatttacttaaagaggtaccgccatttttaagaggaggagaaatgatagacgaggtttacgaggaccattccacatttgcaccttcccctcttaaatttgaagcaggtactcctaatatagagggagcgtatgtgcttatttctgccatagattatatagaaaaaattgggcttaccaatatatataaacacgaaggcgagcttttggagtatggtcttcaaaaaatgagagaattagactttgtaaaattgtatggccccaaagacgcgaaggaaagaggaggaataatttccttcaatgtagaaggagttcatcctcacgatgttgctacaattctcgatgaagaaggagttgctgtaagaagtgggcatcactgttgtcaacccttaatgagatacttaggcgttcctgcaactgtaagagcaagcttttatctctacaacgattttgaggatattgatgcccttgtggaaggactaaaaaaagtcaggaagtggtttaaatga

SEQ ID NO: 712 - protein, 409 aa, Thermoanaerobacter pseudethanolicus
MKNIDIERIKKDFPILSVKPHGKRLVYLDNAATTQKPIEVIKAMDKYYEELNANVYRSPHYLSVLSTQAYEEARERVKKFINAKKEESIVFTRNTTESINFIAYTWGMKHINEGDEILLTIAEHHSNILPWQMVAEAKGAKLKYVYLDENFRLSMKDFKEKMSEKVKLVAVQHMSNVLGIINPVEEITHIAHKYGAKVLIDGAQSVPHMPVDVQKIDCDFFAFSGHKMLGPMGIGVLYIKEDLLKEVPPFLRGGEMIDEVYEDHSTFAPSPLKFEAGTPNIEGAYVLISAIDYIEKIGLTNIYKHEGELLEYGLQKMRELDFVKLYGPKDAKERGGIISFNVEGVHPHDVATILDEEGVAVRSGHHCCQPLMRYLGVPATVRASFYLYNDFEDIDALVEGLKKVRKWFK

SEQ ID NO: 713 - DNA, 1215 bp, Symbiobacterium thermophilum
gtggcccgtatccggcaggactttccgatccttcaccaggagatgaacggtcatcccctggtttacctggacaacgcagccaccacgcagaagccgcgtcaggtgatccaggcgcttgtcgaatactatgagggctacaacgccaacgtccaccgcggcatccacaccctggccgagcgggccacggaggcctacgaagaggcccgggcgaagatcgcccgcttcatcggctccccctcgcccaaccaggtggtctttacccgaaacggcaccgaggccctgaacatgatcgcctacggctggctgcgccaccggctgcgcccgggcgacgtgatcgtcacctcgggcatggagcaccactccaacctcctgccgtggcagcaggccgcgcaggcgacgggcgcgcagatcaagtacattgagctgctgcccgacggcaccctgaaccaggagcactacgaccggctgctgagcgaggggaacgtgcgcttcgtggccttctccggcgcctccaacgtgctgggcaccctcaacccggtgaaggagatggtggccaaggcgcacgcggtgggggccagggtcgcggtggacgccgtgcaggtggttccgcacatgccggtcaacgtggtagactgggatgcggactggatcgccgtggccgggcataagatgctcgcgcccaccggcaccggcttcctctggggcaagatggagctcctggaggagatggagcccacctacttcggcggctcgatgatctccgaggcccacctcaccggcgccaagtgggcccagcccccggccaagttcgaggccggcaccccgaacatcgcagacttcatcgccttcggggccgccgtcgactacctggccgacctgggcatggagaacgtgtacgcccacgagaaggcgctcacggagtacgcctgggaacggctctccgcgatcgacggcatgcggctcttcggtccccggcagccccgggcggggctgatcagcttcgaagtggcaggcatccacccccacgacctgtcggccgtgctcaacgccgaaggcgtcgccatccgggtggggcaccactgcgcccagccgctgatggagatcctggacgtgccggccaccaaccgggcgagcttttatatctacaatacgcaggcggaggtcgaccgcctggtcgagtcgatcctccacgcaaaggagtttttcggagcatga

SEQ ID NO: 714 - protein, 404 aa, Symbiobacterium thermophilum
MARIRQDFPILHQEMNGHPLVYLDNAATTQKPRQVIQALVEYYEGYNANVHRGIHTLAERATEAYEEARAKIARFIGSPSPNQVVFTRNGTEALNMIAYGWLRHRLRPGDVIVTSGMEHHSNLLPWQQAAQATGAQIKYIELLPDGTLNQEHYDRLLSEGNVRFVAFSGASNVLGTLNPVKEMVAKAHAVGARVAVDAVQVVPHMPVNVVDWDADWIAVAGHKMLAPTGTGFLWGKMELLEEMEPTYFGGSMISEAHLTGAKWAQPPAKFEAGTPNIADFIAFGAAVDYLADLGMENVYAHEKALTEYAWERLSAIDGMRLFGPRQPRAGLISFEVAGIHPHDLSAVLNAEGVAIRVGHHCAQPLMEILDVPATNRASFYIYNTQAEVDRLVESILHAKEFFGA

SEQ ID NO: 715 - DNA, 1224 bp, Thermoanaerobacter tengcongensis
atgatggatgtgaagaaaataagagaagattttccgatatttaatgtaaagcctcatggaaagaggcttgtataccttgataatgctgctaccacccagaagcctgagtcggttataaaagccatggaagaatattatgagaaaatgaatgcaaatgtgtacagaagccctcattatttaagcgttctatctacagaggcttatgaaaaggcgagagacaaagtgaaaaagtttgtaaatgcaaagagtgaggagtccattatttttacaagaaatactacagaatcaataaattttattgcctacacatggggaatgaagcacataaaagagggggacgagatagttctgacaatagcggaacatcacagcaacattcttccatggcagatggtagcagaagcaaaaggagcaaaattaaaatatgtgtatcttgatgaaaatttcagactttcaatgaaagattttgaagaaaaaatgtctgatagagtaaaattggtggctgtacagcacatgtcaaatgtcttagggataataaatcctgtggaagaaattacacaaattgctcataagtatggggcaaaagtgctggtggatggggctcagagcgtacctcatatgaaagtggaccttaagaaaataaattgcgactttttcgctttttctggccacaagatgttgggccctatgggaattggagttttgtatataaaagaagacttattagatgaagtgcctccttttttgaggggaggagaaatgatagacgaggtttatgaagaatattccacctttgcacctcctcctttaaaatttgaagcagggactcccaatgtagagggagcttatgtactaatttctgcgatagattatcttgaaaggattggacttgagaatatatatgaacatgaagctaaacttttggagtatggacttgaaaaaattaatgccctcgaatatgtaaaaacttatgggcctatggattcaaaagacagaggaggaataatttctttcaatgtggaaggagttcacccacacgatgttgcgacaatactggatgaagaaggaattgcagtaagaagcggtcaccactgctgtcagcctctgatgagatatttaggggttcctgccactgtgagagccagcttttacctttacaatgactttgatgacatagatgcccttgtggaagcacttaaaaaagtcaggaagtggtttaaatga

SEQ ID NO: 716 - protein, 407 aa, Thermoanaerobacter tengcongensis
MMDVKKIREDFPIFNVKPHGKRLVYLDNAATTQKPESVIKAMEEYYEKMNANVYRSPHYLSVLSTEAYEKARDKVKKFVNAKSEESIIFTRNTTESINFIAYTWGMKHIKEGDEIVLTIAEHHSNILPWQMVAEAKGAKLKYVYLDENFRLSMKDFEEKMSDRVKLVAVQHMSNVLGIINPVEEITQIAHKYGAKVLVDGAQSVPHMKVDLKKINCDFFAFSGHKMLGPMGIGVLYIKEDLLDEVPPFLRGGEMIDEVYEEYSTFAPPPLKFEAGTPNVEGAYVLISAIDYLERIGLENIYEHEAKLLEYGLEKINALEYVKTYGPMDSKDRGGIISFNVEGVHPHDVATILDEEGIAVRSGHHCCQPLMRYLGVPATVRASFYLYNDFDDIDALVEALKKVRKWFK

SEQ ID NO: 717 - DNA, 1230 bp, Verrucomicrobium spinosum
atgacatcagacagcgtcaactgggaggccgtgcgggccgatttccccatcttgcaccaggaggtgcgggggaatccgctcatctatttcgacagcgccgccagctcccagaaaccgcggcaggtcattgatgccctcagccgctattatgagcacgataacgcgaacgtgcaccgtgggctccatgagctgagctcccgtgccaccgatgccttcgaagccgcccgcagcaaggtcgccaagttcctgaacgccgccagcgcggatgagatcatctttacccgcggcaccacagagggcatcaacctcgtggcccaggcctatggcacccgctacgtgaaggagggggacgtggtcctgctcacggagatggagcaccacagcaacctcgtaccctggcaactgctggccgagcgcaccagcgccaccctgcgctttgtccccgtgctggaagacggcaccctggacctgggcaagctgcccgagctgctcacgcccgaggtgaagatcttctccttcacccatatctcaaactcgctgggcaccgtcaacccagtggcagatctgtgccgtgccgcccgtgcggtgggagccctctccgtagtggacgccgcccagagcgccgggcacctgcccgtggacgtgcaggctctcggttgcgacttcctcgccctctccgggcataagatgtgcgcccccaccggcatcggtgccctctacggtcgggccgaggttttggagaaaacccctccctaccatggcggcggggagatgatcgtcagcgtctcgctgcacaagagcacctataaagaggccccgcaccggtttgaagcaggcacccccaacatcgcaggtgccgtgggactcggcgccgccgtggactacctggagagcatcggccggcagaacatcgcggagcacgatagcaccctcgtcagctatgcccagcagcgcatggaggcagacgtgcccggcatccgcatcatcggcccccgtgatcgcagcgggctcgtcgggtttgtcatggagtccgcgcatccgcatgatctcaccacctatgccgaccgctacggcctcgccctccgcggcgggcatcattgcaaccagcccctcatgaagaagttcaggctgcccggcacctcccgcgccagcttctacttctacaacaccaaggaggagatcgatcgcatgatcaccatcctccaggaggccgcccgattcttcagttga

SEQ ID NO: 718 - protein, 409 aa, Verrucomicrobium spinosum
MTSDSVNWEAVRADFPILHQEVRGNPLIYFDSAASSQKPRQVIDALSRYYEHDNANVHRGLHELSSRATDAFEAARSKVAKFLNAASADEIIFTRGTTEGINLVAQAYGTRYVKEGDVVLLTEMEHHSNLVPWQLLAERTSATLRFVPVLEDGTLDLGKLPELLTPEVKIFSFTHISNSLGTVNPVADLCRAARAVGALSVVDAAQSAGHLPVDVQALGCDFLALSGHKMCAPTGIGALYGRAEVLEKTPPYHGGGEMIVSVSLHKSTYKEAPHRFEAGTPNIAGAVGLGAAVDYLESIGRQNIAEHDSTLVSYAQQRMEADVPGIRIIGPRDRSGLVGFVMESAHPHDLTTYADRYGLALRGGHHCNQPLMKKFRLPGTSRASFYFYNTKEEIDRMITILQEAARFFS

SEQ ID NO: 719 - DNA, 1254 bp, Oenococcus oeni
atgcccaaaaatcagtttcgtgacgattttcctattttgaataatgtgaaaatgaatgatgaacccttggcttatttggataatgcggcaacgagccaaaaaccccaacttgttatcgacagaattagcaggtattacggttatgagaatgctaatattcaccgagcaacacatgctttggctttaaaagcgactgacgattacgagcaggtccgtgaccaggtgcggcatttcattaatgcaaagtcccgcgacgagataatttttacccgcagcacaactgaaagtttaaattgggtggctcagcgctggggtgaagcaaaacttaaaccgggagacgaaattgttctttcgattttagaacatcacagtaatctcgtaccttggcagcaggtggccaaaaaaaccggagcccgtttacgctttttggattttaatcaagaaggtgtgattgatttgaatgctgccaaaaaaacaattaatgcaaaaacgaaaattgtcagcattactcaggtttctaacgtacttggcagtattcagccggtcaaagagttggcgattatggctcatgaggttaatgcaattatgattgtcgatgctgcccaaagcgttcctcattttaagattgatgtccaaaatcttgactgtgattttttggcattttctgctcacaagatgctggggccaaccggagtcggtgttttatatggtaaaagtgaattgcttgagaaaattgatccggagtttttcggtggcgagatgattgaagaagttagtaaaaatgaagcgagcttcaaaagtggcgcattgcgttttgaagccgggacgcaaaatattgccggcgtaattgcttttggcgctgccttaacatatttacaaaaagttggttttgataaaattgctgcacaagatcggtccttaatggaagcagctatttctgctttgcaaaatagaccgcaggtgaagatttatggatcagccgatcctgctaatcacaccggaattatttcttttaatgttggtgaaattcaccctcatgatgtatcgacagttttcgatcttgacggagttgcgattcgagccggacatcattgtgccgaaccattaatgaaccgtttgggtgtttcagcaacctgccgggcaagcttttatttttataataatttggacgacgtcgagagatttttaattgctataaaagatacggaagatttttttaatcgtcacccttcaaaggagtcctcaaatggctaa

SEQ ID NO: 720 - protein, 417 aa, Oenococcus oeni
MPKNQFRDDFPILNNVKMNDEPLAYLDNAATSQKPQLVIDRISRYYGYENANIHRATHALALKATDDYEQVRDQVRHFINAKSRDEIIFTRSTTESLNWVAQRWGEAKLKPGDEIVLSILEHHSNLVPWQQVAKKTGARLRFLDFNQEGVIDLNAAKKTINAKTKIVSITQVSNVLGSIQPVKELAIMAHEVNAIMIVDAAQSVPHFKIDVQNLDCDFLAFSAHKMLGPTGVGVLYGKSELLEKIDPEFFGGEMIEEVSKNEASFKSGALRFEAGTQNIAGVIAFGAALTYLQKVGFDKIAAQDRSLMEAAISALQNRPQVKIYGSADPANHTGIISFNVGEIHPHDVSTVFDLDGVAIRAGHHCAEPLMNRLGVSATCRASFYFYNNLDDVERFLIAIKDTEDFFNRHPSKESSNG

SEQ ID NO: 721 - DNA, 1218 bp, Mariprofundus ferrooxydans
atgtttgatattgaagccatacggaatgatttcccgattttggggcagcagatttacggcaagccgctggtctatctggataatgccgccaccacacagaagccgcagtgcgtcattgatgcggtgaaccattactatgcgtgcgataacgccaatgtgcatcgtggcgtacatgccctctccgagcgggccacagccgattacgaagcggcacgcaagatcattgccggtttcttcaatgcccgcagcgagcgcgaagtgatcttcacccgcggcaccaccgaggcgatcaatctggtcgcatcggcatggggtggagccaatgtccgtgccggtgatgaggtagtgatcacccacatggagcaccactccaatatcgtgccgtggcagatgctgtgcgagcgggttggtgccacattgaaggttgcaccgatcaacgagcagggcgagctgatcatcgatgcgtttgaggcgctgcttaacgagcacacaaagtttgtcggcgtcgtgcacatgtccaatgcgctgggcacgatcaacccggttgccgagatcattgccaaagcccatgccgtcggtgcaacagtgctggtcgatggcgcccaggccgccgcccatctggctgtcgatctgcaggcgctggatgctgatttttatgtgaccagcgcacacaagatgtacggccccaccggcgtcggcgtactgatcggcagggagtcgattctcgatgccatgccgccgtatcagggtggtggcgacatgatccgcatggtcaccttcgaaaaaacggaatacaacgagctgccctacaagtttgaagccggcacaccgcatatcgccggcgccatcggtttcggcaaggccatcgaatatattcagggcatcggtttcgacctcattggcaaacgcgaaaaagagctgctggcctatgccacggccaaagccgaaagctttgacggcctgcgccagatcggcaccgcaggagagaaggcatgcgtgctctcatttgtgctggccggcgtacatccgcatgatctgggcaccattgtcgatcgcgagggcgtggccattcgggcaggccatcactgtgccatgccggtgatgcagtttttcaaggtgccggctaccgcacgcgcctccttctcgatctataacacaaaggcggaagtcgataccctgtttgccgccctgcaaaaggcgcaggctattttcgcatga

SEQ ID NO: 722 - protein, 405 aa, Mariprofundus ferrooxydans
MFDIEAIRNDFPILGQQIYGKPLVYLDNAATTQKPQCVIDAVNHYYACDNANVHRGVHALSERATADYEAARKIIAGFFNARSEREVIFTRGTTEAINLVASAWGGANVRAGDEVVITHMEHHSNIVPWQMLCERVGATLKVAPINEQGELIIDAFEALLNEHTKFVGVVHMSNALGTINPVAEIIAKAHAVGATVLVDGAQAAAHLAVDLQALDADFYVTSAHKMYGPTGVGVLIGRESILDAMPPYQGGGDMIRMVTFEKTEYNELPYKFEAGTPHIAGAIGFGKAIEYIQGIGFDLIGKREKELLAYATAKAESFDGLRQIGTAGEKACVLSFVLAGVHPHDLGTIVDREGVAIRAGHHCAMPVMQFFKVPATARASFSIYNTKAEVDTLFAALQKAQAIFA

SEQ ID NO: 723 - DNA, 1230 bp, Opitutus terrae
atgccctcctggtccaccgtccgtgacgattttccgatcctgcatcagcaggttcacggaaagccgttggtctatctcgacaacgccgccacgacgcagaagccgcgcagcgtgatcgatgcgctcgtgcactactacgagcgcgacaacgccaacgtgcaccgcgggctgcacgcgctatccacccgcgctaccgatgcctacgaaggcgcccgcgcgcgcatcgcccggtttctcaacgccgccgatcccgcggaaatcatttttacgcgcggcaccacggagagcgtcaacgtcgtcgcccgcagcttggcgcacgtgctgaagcccggcgacgtgattctttccacggagatggagcatcactccaacctcgtgccctggcagcagctcgcgcgggccaccggcgcgaagctccggttcgtgccgatcgtcggcgcggacgccgagggcggactcgatctcgctgccctcgaccggctgcttacgccggaggtcaaggtcttcgcgttcacgcacctatccaacacgctgggcacgatcaatcccatcgctgaactctgcgcccgcgcacgcgcaatcggcgcgctcacggtgatcgacgccgcgcaatccggcggacacgccccgctcgatgtgcgggcgctcgggtgcgactacctcgtgctgtccggccacaagatgtgcggtccgaccggcatcggcgtgctttacggaaaacgcgaactgctggaccggctcacgcccaccgaaaccggcggaggaatggtcgtgacggttcactacgaagacgccacgtggaagccatcacccgaacggttcgaggccggcacgccgaacatcgccggcgccatcggactcgccgcggcgtgcgactacctcgacgcgctcggtcgcgacgcgattgcgcggcatgaccacgaactcggccggctcgcttacgagaagctcgccgaactgccaggcatccggttgatcggaccacgcgacggtcggagcggcgtggtgagcttcgcgttcgaaggcgtgcatgcccacgacgtggtgacgttcgccgacgaggatggcatcgcactgcgcggcgggcatcactgcaaccagccattgatgcgcaagctgggcctcaccagtaccacgcgggcgagcttttatctctacaacacgcccgaggaaatcgacgcgctggtcgcgagtctgcgcaagatcctgaagttcttcggcgtgagctga

SEQ ID NO: 724 - protein, 409 aa, Opitutus terrae
MPSWSTVRDDFPILHQQVHGKPLVYLDNAATTQKPRSVIDALVHYYERDNANVHRGLHALSTRATDAYEGARARIARFLNAADPAEIIFTRGTTESVNVVARSLAHVLKPGDVILSTEMEHHSNLVPWQQLARATGAKLRFVPIVGADAEGGLDLAALDRLLTPEVKVFAFTHLSNTLGTINPIAELCARARAIGALTVIDAAQSGGHAPLDVRALGCDYLVLSGHKMCGPTGIGVLYGKRELLDRLTPTETGGGMVVTVHYEDATWKPSPERFEAGTPNIAGAIGLAAACDYLDALGRDAIARHDHELGRLAYEKLAELPGIRLIGPRDGRSGVVSFAFEGVHAHDVVTFADEDGIALRGGHHCNQPLMRKLGLTSTTRASFYLYNTPEEIDALVASLRKILKFFGVS

SEQ ID NO: 725 - DNA, 1263 bp, Nitrosococcus oceani
atgaccattgcaaacatcgcagctgaagtacctatagcaagtgtcccttttgagattgagcgggcccgcgctgacttccctgttttgcaacaggaagtacatgggaagcctttggtgtatctagataatgcggcgactatgcaaaaacctagacaagttactgaggcgattgatcactattaccgttgggataatgccaatatccaccgtgctgtgcatcaacttagcgaacgggcgacccaagcatacgaggcggcgaggaataaagtgcaacactttattaacgctgctcggcgggaagaaattgtgtttgtacggggcactaccgaagcaatcaatttagtcgcccaaagcttcggccgaagccggttgcaagcgggtgatgaaattctgctctcccatatggagcatcactctaacattgtgccgtggcagctcctatgcgagcagacgggggcagtgcttaaagtcgttcctatcgatgataccggggaattgcttttagatgagtacgagaggtgtttgtcacctcgcacccggctggtagccatggtgcatgcttctaatgttttgggaactatcaatccagcacaaaaaatcattgagctagcccatgcccgtgggattccggtgttgctagatggggcccagactgttccccacatgcccgtggatgtccaggagctggactgtgatttttacgctttttcagctcataaaatggtaggacccacaggtattggcgtgctctatggcaagcgcgaatggctagaagctatgcctccttatcagggcggcggagatatgattctgtcggtaagttttgataaaacgctttatagcgatctcccctataagttcgaggcgggaactcctcatatcgctggagccattggcctgggtgtagcgatagattatctagagaccctagggatggaaaacattgcggcctatgagcaggaattgcttaactatgggacagaggttctggctcaagttcccggactgcgttttattggcacagcccaagaaaaagtaggggtattatcctttgtcttggagggcgtccatcctcatgatatcggtaccattcttgatcatgaaggtattgccattcgcacaggacatcattgcgcccagccggtaatggaacgttttaatattcccgcaacggcaagagcctccctagcattttacaatactaaggctgaaatggatgttctggcagctggaattaagcgggtaggagagttattgggataa

SEQ ID NO: 726 - protein, 420 aa, Nitrosococcus oceani
MTIANIAAEVPIASVPFEIERARADFPVLQQEVHGKPLVYLDNAATMQKPRQVTEAIDHYYRWDNANIHRAVHQLSERATQAYEAARNKVQHFINAARREEIVFVRGTTEAINLVAQSFGRSRLQAGDEILLSHMEHHSNIVPWQLLCEQTGAVLKVVPIDDTGELLLDEYERCLSPRTRLVAMVHASNVLGTINPAQKIIELAHARGIPVLLDGAQTVPHMPVDVQELDCDFYAFSAHKMVGPTGIGVLYGKREWLEAMPPYQGGGDMILSVSFDKTLYSDLPYKFEAGTPHIAGAIGLGVAIDYLETLGMENIAAYEQELLNYGTEVLAQVPGLRFIGTAQEKVGVLSFVLEGVHPHDIGTILDHEGIAIRTGHHCAQPVMERFNIPATARASLAFYNTKAEMDVLAAGIKRVGELLG

SEQ ID NO: 727 - DNA, 1215 bp, Lactobacillus delbrueckii
atggacaagaattggaataagctccggcaggatttccccatcctggctgaaaaaatgaacggcgagcccctggtctacctggataacgcggccaccagccagaagcccaagagtgtgattgaggcaattactgctttttatcaaaaagaaaatgccaatatctaccggggaacttatgccctgtctgccaaggcaacagaggcttatgaaggagtccggcagaaggcagcagattttattggtggtgaggccagcgaaatagtttttaccaaggggacgacttcggctatcaatttggcggcctttggctattttttgcggcatttaaaagcgggagacgagatcgccttaactgccgctgagcaccacagcaatctggtcccttggcagcaagttgccgcccttaccggggccaagctggtctttttgcccctggacaaaaagggccgggttgacttaaaggaagcagaaaaagtgatgtctgaccgcctccgcctcttagccctggcccaggttaacaatgtcttagggactgagcagccggtcaaagagctggcggccttggccaaaaagcgcggggccctggttttagtcgacggagcccaggcagcgggccacttgccagttgccgtcaaaaaattaggcgccgacttttacgctttttccgcccacaagatgctgggccagaccgggaccggggtcttgtacggccgaaaagaactcttggaccagacccagcctttggaatttggcggggagatgatcagagaggtcagcaaaactaccgcgactttcaagccggccccgcaaaagtttgaggccggcagtcagaacgtgtccggcgtagttgccttgggggcagcgatcgactatttgaatgcaattggcttagatgctattaaagacagggaaacagaattaggccaggccatggcggaaggcttgagaaaagcaggcgccagggtttacgggcaggggggcggcatcgcatctttcaacctgcctggcgttcacccccacgatttagcgacggccctggacgcccagggtattgccatccgggccggccagcattgcgcccagcccatgatggactggttaggagtcaaggccgttgcccgggccagcgcggctttttacaacaatgaagctgatgtggaagccttgattaagggagtgcaagcggcgaaggagtttttcaatggcactagatga

SEQ ID NO: 728 - protein, 404 aa, Lactobacillus delbrueckii
MDKNWNKLRQDFPILAEKMNGEPLVYLDNAATSQKPKSVIEAITAFYQKENANIYRGTYALSAKATEAYEGVRQKAADFIGGEASEIVFTKGTTSAINLAAFGYFLRHLKAGDEIALTAAEHHSNLVPWQQVAALTGAKLVFLPLDKKGRVDLKEAEKVMSDRLRLLALAQVNNVLGTEQPVKELAALAKKRGALVLVDGAQAAGHLPVAVKKLGADFYAFSAHKMLGQTGTGVLYGRKELLDQTQPLEFGGEMIREVSKTTATFKPAPQKFEAGSQNVSGVVALGAAIDYLNAIGLDAIKDRETELGQAMAEGLRKAGARVYGQGGGIASFNLPGVHPHDLATALDAQGIAIRAGQHCAQPMMDWLGVKAVARASAAFYNNEADVEALIKGVQAAKEFFNGTR

SEQ ID NO: 729 - DNA, 1221 bp, Escherichia coli
atgattttttccgtcgacaaagtgcgggccgactttccggtgctttcgcgtgaggtaaacggtttgccgctggcttatctcgacagcgccgccagtgcgcagaaaccgagccaggtgattgacgccgaggccgagttttatcgtcatggctacgcggcggtgcatcgtggtattcataccttaagcgcccaggcgaccgagaaaatggagaacgtgcgcaagcgggcatcgctgtttattaatgcccgttcggcggaagagctggtgttcgtccgcggcacgacggaagggatcaatctggtcgccaatagctggggcaacagcaacgtgcgggcgggcgataacatcatcatcagtcagatggagcaccacgctaacattgttccctggcagatgctttgcgcacgcgttggcgcagagctgcgtgtgatcccgctcaatcccgatggtacgttgcaactggagacgctgcctacgctgtttgatgagaaaactcgcctgctggcaattactcatgtctccaacgtgcttggcacagaaaatccactggcggaaatgatcacgcttgcgcaccagcatggcgcaaaagtgctggtggatggcgctcaggcggtgatgcatcatccggtggatgttcaggcgctggattgcgacttttacgtgttctccgggcataaactgtatggccccaccggaattggcattctttatgtgaaagaagccttgttgcaggagatgccgccgtgggaagggggcggttctatgatcgccaccgtcagcctgagtgaaggcactacctggaccaaagcaccatggcggtttgaagccggtacacccaataccgggggcatcattggtcttggcgcggcgctggagtatgtttcggcgctggggcttaataacatagccgagtatgaacagaatctgatgcattatgcgctatcacagctggaatctgtaccggatctcactctctatggcccacaaaacaggcttggcgttattgcttttaatctcggtaaacaccacgcctatgatgttggcagttttctcgataattacggcattgctgtgcgtaccggacatcactgcgcaatgccattgatggcctattacaacgtccctgcgatgtgtcgggcgtcgctggccatgtataacacccatgaagaagtggatcgtctggtgaccggcctgcaacgtattcaccgtttgctgggataa

SEQ ID NO: 730 - protein, 406 aa, Escherichia coli
MIFSVDKVRADFPVLSREVNGLPLAYLDSAASAQKPSQVIDAEAEFYRHGYAAVHRGIHTLSAQATEKMENVRKRASLFINARSAEELVFVRGTTEGINLVANSWGNSNVRAGDNIIISQMEHHANIVPWQMLCARVGAELRVIPLNPDGTLQLETLPTLFDEKTRLLAITHVSNVLGTENPLAEMITLAHQHGAKVLVDGAQAVMHHPVDVQALDCDFYVFSGHKLYGPTGIGILYVKEALLQEMPPWEGGGSMIATVSLSEGTTWTKAPWRFEAGTPNTGGIIGLGAALEYVSALGLNNIAEYEQNLMHYALSQLESVPDLTLYGPQNRLGVIAFNLGKHHAYDVGSFLDNYGIAVRTGHHCAMPLMAYYNVPAMCRASLAMYNTHEEVDRLVTGLQRIHRLLG

SEQ ID NO: 731 - DNA, 1251 bp, Rhodoferax ferrireducens
atgaacaacacatccgctgtcaccatgccacccgcctttaatgtggcccgcgttcgcgctgattttcctattcttggcctcacggtggcgggcaagccgctggtctatctcgataacgccgcatcgagccagatgccgcagccggtgattgaccgcctggtgcgctatcagagcacggaacacgccaacatccaccgtgcggtgcattacctgtcggagaccgccaccgctgcctacgaggcggcgcgcacccggctgcagcggttcatcaacgcgcgtgaagcgcgcgaggtgatctttaccagcggcaccaccgagggcatcaacctggtggcgcatggctggggccgccagaacatcagggccggtgatgagatcattttgaccgtgctggaacaccactcgaacatcgtgccatggcaaatgctcgcgctggagaaaggcgccatccttcgcgtggtgccgatcaacgacgccggtgagttgctggttgacgagtacgaggcgcttttcaacgagcgcacccgtttggtgagcgtcggccacgtgtcgaacgcgctgggcagcatcaacccggtcaagcagatgatcgcttttgcgcacgcacgtggtgtgcccgtgctggttgatggcgcgcaggccgcgccgcacctggcggtggacgtgcaggatctggactgtgatttttatgctttctcgggccacaagatgtgcggcccgactggtatcggcgttctgtatggtcgcgccgccctgttagaggcgatgcagccgttcaagggtggcggcgacatgatccataccgtcacctttgaaaaaactacttacgcccccattccaaacaagttcgaggccggcacgccaccgattgctgctgccatcggcctgggtgctgcagtggattacctgtcaagcatcggcatgccggccatcgccgcgcacgagcatgaattattgcgctatgcgactgaacacttaagtgcgctgccgggtgtgcgtctgatgggcaccgcgaaagacaaggccgcggtgttgtcctttgccgtgcagggcattcacccgcacgacatgggcactttgctcaaccaggaaggtgtggcagtgcggaccggccaccactgcgcgcagcccttgatggtgcgcctgggcgtggtggccacctcgcgcgcttcgtttgcgttttacaacacgctggccgatgtggacgcgctggtcgctggcattcgcagtgttcaaaaggtgttcgcatga

SEQ ID NO: 732 - protein, 416 aa, Rhodoferax ferrireducens
MNNTSAVTMPPAFNVARVRADFPILGLTVAGKPLVYLDNAASSQMPQPVIDRLVRYQSTEHANIHRAVHYLSETATAAYEAARTRLQRFINAREAREVIFTSGTTEGINLVAHGWGRQNIRAGDEIILTVLEHHSNIVPWQMLALEKGAILRVVPINDAGELLVDEYEALFNERTRLVSVGHVSNALGSINPVKQMIAFAHARGVPVLVDGAQAAPHLAVDVQDLDCDFYAFSGHKMCGPTGIGVLYGRAALLEAMQPFKGGGDMIHTVTFEKTTYAPIPNKFEAGTPPIAAAIGLGAAVDYLSSIGMPAIAAHEHELLRYATEHLSALPGVRLMGTAKDKAAVLSFAVQGIHPHDMGTLLNQEGVAVRTGHHCAQPLMVRLGVVATSRASFAFYNTLADVDALVAGIRSVQKVFA

SEQ ID NO: 733 - DNA, 1215 bp, Thermus thermophilus
atggacctaagcgccctgagggaggacttccccctcttcgcccagcgcccggagctcgtctacctggactccgccgccacgagccagaagcccaggcgggtcatagaggccctgaggcgctactacgagaccttgaacgccaacgtccaccggggggcctaccggctctccgccgaggccaccgaggcctacgaggaggcgcggaggcgcctggcccgctttctcaacgccgagcccaaggagatcgtctttgtgcgcaacaccaccgaggccatgaacctggtggcctacgcctggggccttaggaaccttaaggagggggacgaggtcctggtcacggagatggagcaccatgcgggcctcgtcccctggcacctggtggcaggcctcaccggggccaaggtgaaggccatccccctcaccgaggagggaaggctggacctaagcgccctggaggacctcctcacggaaaggaccaaggtggtctccctggtccacatgtccaacgtcctcggcaccatcaaccccgtggccgagatcgcaaggagggccaaggaggccggggccctcgtggtggtggacggggcccagtccgccccccacctccccgtggacgtcaaggcccttggcgccgacttcttcgccctttccgggcacaagatgctggggcccacgggggccggggtcctttgggggcggtacgaggtcctggaggggatgatgccctttttggggggcggggagatgatcctcgaggtccacgtggaccggtccacctacgcccccccgccccagcgctttgaggcgggcaccccccccatcgccgaggccatcgccctgggggaggccgcctgctacctcatggaggtggggatggacaaggtcttcgcccacgaccgggcccttctggagtacgccctaaagcgcctggaagaggtgccgcgcctccgggtctacgggcctaggggcgaggaccggggcggggtcatccccttcaccttaggccgcctccacgcccacgacctcgccaccttcctggaccaggaggggatcgccgtgagggcgggccaccactgcgcccagcccctccaccggaagctcggccttgcggccacggcccgggcgagcttctacctctacaacacgaaggaagaggtggaccgcttcgtggaagcccttctaaggatagaggccaagtaccgggcctggctataa

SEQ ID NO: 734 - protein, 404 aa, Thermus thermophilus
MDLSALREDFPLFAQRPELVYLDSAATSQKPRRVIEALRRYYETLNANVHRGAYRLSAEATEAYEEARRRLARFLNAEPKEIVFVRNTTEAMNLVAYAWGLRNLKEGDEVLVTEMEHHAGLVPWHLVAGLTGAKVKAIPLTEEGRLDLSALEDLLTERTKVVSLVHMSNVLGTINPVAEIARRAKEAGALVVVDGAQSAPHLPVDVKALGADFFALSGHKMLGPTGAGVLWGRYEVLEGMMPFLGGGEMILEVHVDRSTYAPPPQRFEAGTPPIAEAIALGEAACYLMEVGMDKVFAHDRALLEYALKRLEEVPRLRVYGPRGEDRGGVIPFTLGRLHAHDLATFLDQEGIAVRAGHHCAQPLHRKLGLAATARASFYLYNTKEEVDRFVEALLRIEAKYRAWL

SEQ ID NO: 735 - DNA, 1257 bp, Streptomyces avermitilis
gtgacgcagctgccgggcctcctcgacaccgaggcgatccgcaaggacttccccatcctggaccgtcaggtccacgacggtaagaagctcgtgtacctggacaacgcggcgacgtcgcagaagccccgccaggtgctggacgctctcagtggctactacgagcgctacaacgccaacgtccaccgcggtgtgcatgtgctcgccgaggaggccacggcgctgtacgagggcgcgcgcgacaaggtcgccgcgttcatcaacgcgccgagccgcgacgaggtgatcttcaccaagaacgcctccgagtcgctcaacctcgtggccaacatgctgggctgggccgacgagccctaccgcgtggaccacgagaccgagatcgtcatcaccgagatggagcaccactccaacatcgttccgtggcagctgctggcgcagcgcacgggcgcgaagctgaagtggttcggcctcacggacgacggccggctcgacctgtcgaacatcgacgagatcatcacggagaagacgaagatcgtctccttcgtgctggtgtcgaacatcctgggcaccgtgaacccggtcgaggcgatagtgcgccgcgcccaggaggtcggcgctctggtctgcatcgacgcctcgcaggccgccccgcacatgccgatggacgtccaggccctccaggccgacttcgtggccttcaccggccacaagatgtgcggtccgacgggcatcggtgtcctctggggccgccaggagctgctggaggacctcccgccgttcctcggcggcggcgagatgatcgagaccgtgtcgatgcactcgtcgacgtacgctcccgccccgcacaagttcgaggcgggcacgcctccgatcgcgcaggcggtcggtctgggcgcggcgatcgactacctcgactccatcggcatggacaagatcctcgcccatgagcacgcgctcaccgagtacgcggtcaagcgcctcatggaggtcccggacctcaggatcatcggcccgacgacggccgaggaccgcggcgcggcgatctcgttcacgctgggtgacatccacccgcacgacgtgggccaggtcctggacgagcagggcatcgcggtccgggtcggccaccactgcgcccgcccggtctgcctgcgctacggaattcctgcgaccacgcgagcgtcgttctatctgtactccacgccgaccgagatcgacgcactggtcgacggcctggagcacgtacggaacttcttcggctga

SEQ ID NO: 736 - protein, 418 aa, Streptomyces avermitilis
MTQLPGLLDTEAIRKDFPILDRQVHDGKKLVYLDNAATSQKPRQVLDALSGYYERYNANVHRGVHVLAEEATALYEGARDKVAAFINAPSRDEVIFTKNASESLNLVANMLGWADEPYRVDHETEIVITEMEHHSNIVPWQLLAQRTGAKLKWFGLTDDGRLDLSNIDEIITEKTKIVSFVLVSNILGTVNPVEAIVRRAQEVGALVCIDASQAAPHMPMDVQALQADFVAFTGHKMCGPTGIGVLWGRQELLEDLPPFLGGGEMIETVSMHSSTYAPAPHKFEAGTPPIAQAVGLGAAIDYLDSIGMDKILAHEHALTEYAVKRLMEVPDLRIIGPTTAEDRGAAISFTLGDIHPHDVGQVLDEQGIAVRVGHHCARPVCLRYGIPATTRASFYLYSTPTEIDALVDGLEHVRNFFG

SEQ ID NO: 737 - DNA, 1218 bp, Clostridium sp.
atgatagagaagaattataaagaggattttccgttattacagacaaataaaaccatttatatagacaatgcagctacagcacagaagccggcagttgtaattgaagcagagaagcgtttttatgaagaaagcaatgcaaatccgcttcgtggcttctatccgctgagccttgcagcaacagaagcatatgaagatgccagaaaagttgtgcgtgattttattcatgcagattcggaaaaagaaatcatctttacaagaaatacaacagagagtctgaaccttgttgcatacagctatgcatgcagtcatctgaaagaaggagatgagatcgcagtcagcatcatggaacatcacagcaacattctcccatggcagatggcagcgagaatgacaggtgcaacggtccggtatctgaactgtgagaaggacggtattttgacagatgagacacttgcagcaggaatcaatgagaagacaaagcttgtagcgatcggacaggtatccaatgttctcggttgtgtgaatccgatcaagaagatttcaaagcttgcacatgcagtcggcgcggtcattgtagtagatgcagcacagagtgcaccgcatatgccgatcgacgtcaaagatctggatgcagatttccttgcattttccggtcataagctgatgggaccgatgggtatcggcgtgttatatggaaaagaagcattactggaagagatgccgccatttatgacaggtggcgagatgatccagtccgtaacgacagaaggagcggtatgggctgagcttccgcataagtttgaggcaggaactgtaaatgcagccggtgcagccggacttgaagccgcaatttcatatattaataagattggatttgagacaatcgagcagagagaactggaactgacccgacatgcgatggaaggacttgcaaagattccgcatgttcatgtgatcggctcagaagatcctgcaaaccataccggtattgtggcatttacgatcgacaatgtacatccacatgatgtcagtgagatcatggcagcagatggtatcgatgtccgtgcagggcaccattgcgcacagccattacttacttatctgaaggtgtataatacaacaagagccagctttatgttctacaatacgatagaagaagtcgatgcatttgtagagagtgttgcaaatgtcagaaggagaatgggatatggagaatag

SEQ ID NO: 738 - protein, 405 aa, Clostridium sp.
MIEKNYKEDFPLLQTNKTIYIDNAATAQKPAVVIEAEKRFYEESNANPLRGFYPLSLAATEAYEDARKVVRDFIHADSEKEIIFTRNTTESLNLVAYSYACSHLKEGDEIAVSIMEHHSNILPWQMAARMTGATVRYLNCEKDGILTDETLAAGINEKTKLVAIGQVSNVLGCVNPIKKISKLAHAVGAVIVVDAAQSAPHMPIDVKDLDADFLAFSGHKLMGPMGIGVLYGKEALLEEMPPFMTGGEMIQSVTTEGAVWAELPHKFEAGTVNAAGAAGLEAAISYINKIGFETIEQRELELTRHAMEGLAKIPHVHVIGSEDPANHTGIVAFTIDNVHPHDVSEIMAADGIDVRAGHHCAQPLLTYLKVYNTTRASFMFYNTIEEVDAFVESVANVRRRMGYGE

SEQ ID NO: 739 - DNA, 1218 bp, Coprococcus eutactus
atgacagacaggaattatagagaggattttcctctgttgaggaataacgatacagcatatatagacaatgcggccacagcacagaagccacaggtggtcatagacgctgagagagagttctacgagaagagcaatgcgaatccgctcagaggcttctatccactcagtcttgaggctacagagaagtatgagagtgccagaaaggtagtcagggacttcattcacgctgactctgagaaggagataatcttcacaaggaataccacggagagccttaaccttgtggcatacagctacgcgctgaataaccttaaggctggtgacgagatagcggtcaccatcatggagcaccacagcaatatgcttccatggcagatggcagccagagtcacaggcgcaactctcagatatctcgactgcgagaaggatggaacgctgactgacgagaccatcaatgccggcatcaatgagcacactaagctgcttgctgtcggacatgtgtcaaatgttctcggatgcgtgaatccggtcaggaagatggctgacagagcgcacagctttggtgcggttgtcgtagttgacggtgcgcagagtacaccgcatatgactatagatgtgcatgagctgggtgctgatttctttgcattctcaggtcacaagctgatgggacctatgggaataggagtgttatacggaagacaggaactgcttgacgcgatgcctccattcatgtcaggtggagagatgatagattcggtttcaagagatggtgcggtatatgcggaattgcctcacaagtttgaggctggtacagtcaatgcggctggagctgcgggacttgcggctgctataggctacatcaaagaggttggatttgactatatagaaaagagagagctggagcttaccacccgtgccatggagggacttgcgaaaatacctcatgtgcatgtgatcggttcggacaagccggagaatcacacaggaatagtcgcgttcaccatagacaatgttcacccgcatgacgtcagcgagatcatggctgcggatggaatagatgtgagagcaggacatcactgtgcacagccactgctcgtccacctcggcgtgtacaatacgacaagggcaagctttatgttctacaatacagatgaagaggtagatgcatttgtggagagtgttgcaaatgtgagaaggagaatgggatatgcagaataa

SEQ ID NO: 740 - protein, 405 aa, Coprococcus eutactus
MTDRNYREDFPLLRNNDTAYIDNAATAQKPQVVIDAEREFYEKSNANPLRGFYPLSLEATEKYESARKVVRDFIHADSEKEIIFTRNTTESLNLVAYSYALNNLKAGDEIAVTIMEHHSNMLPWQMAARVTGATLRYLDCEKDGTLTDETINAGINEHTKLLAVGHVSNVLGCVNPVRKMADRAHSFGAVVVVDGAQSTPHMTIDVHELGADFFAFSGHKLMGPMGIGVLYGRQELLDAMPPFMSGGEMIDSVSRDGAVYAELPHKFEAGTVNAAGAAGLAAAIGYIKEVGFDYIEKRELELTTRAMEGLAKIPHVHVIGSDKPENHTGIVAFTIDNVHPHDVSEIMAADGIDVRAGHHCAQPLLVHLGVYNTTRASFMFYNTDEEVDAFVESVANVRRRMGYAE

SEQ ID NO: 741 - DNA, 1275 bp, Thermobifida fusca
gtgacacgcgagctggatgtcgagacgatccgggcagacttcccgatcctgtcccggaccgtccgcaatgagcgtccgctggtgtacctcgactccggggccacatcccagaaaccccggcaagtcctcgacgccgagcgggagttctacgaacgctataacgcggcggtgcacaggggcgcgcaccagctcgcggaggaggccactgacgcctatgaggcggcccgggccaccatcgcggccttcgtcggtgcccctgctgacgaagtggtgttcaccaagaacgccacagaagcgatcaacctcgtcgcctacgccatgagcaacgcggtcaccgcgggcgaggaattctcccgcttcgccgtgaaacccggcgacgagattgtggtcactgaaatggagcaccacgccaacctggtgccctggcaggagttgtgccgccgcaccggagcgacactgcgctggttcggggttaccgacgagggccgcctcgacctgtccaacttggacgacctcatcaacgagcgcaccaagctcgtggcgctcatccaccagtccaacgtgctgggcaccgtcaacccggtccagttgatcgcggagcgggcgcacgcggtcggcgcgctggtcctcgtggacggcgcccagtcggtcccgcacatgccggtcaacgtcaccgagctgggcgtggacttcctcgtgttctccgggcacaagatgtgcggccccaacggcatcggcgtgctgtgggggcgccgggagctgctgtgcgccatgccgccgttcatcaccggcggctccatgatcggcacggtgcacatggagcacagcacgtgggccgacccgccgcagcggttcgaagccggcgtcccgatggcgccccaggcagtcggcctggccgcggcatgcgactacctcaactccatcgggatggacgccatcgccgcgcacgagcacgctctcgtggaatatgcgctcaaacacattggttccatcgagggtgtacgaatcgtcggaccggccgacgccgaggcacgtgggggcgccgtctcgttcaccgttgacgggatccacccccacgatgtgggccaggtactggacgacctgggggtggccgtgcgggtggggcaccactgtgcatggccgctgcaccgcaggtttgaggcggtagccaccacgcgcgcctcgttctacctgtacaactccttcgccgacgtggacgccctggccgaagggatccgggaggcgcagcgattcttcggcgtggcccgaagctag

SEQ ID NO: 742 - protein, 424 aa, Thermobifida fusca
MTRELDVETIRADFPILSRTVRNERPLVYLDSGATSQKPRQVLDAEREFYERYNAAVHRGAHQLAEEATDAYEAARATIAAFVGAPADEVVFTKNATEAINLVAYAMSNAVTAGEEFSRFAVKPGDEIVVTEMEHHANLVPWQELCRRTGATLRWFGVTDEGRLDLSNLDDLINERTKLVALIHQSNVLGTVNPVQLIAERAHAVGALVLVDGAQSVPHMPVNVTELGVDFLVFSGHKMCGPNGIGVLWGRRELLCAMPPFITGGSMIGTVHMEHSTWADPPQRFEAGVPMAPQAVGLAAACDYLNSIGMDAIAAHEHALVEYALKHIGSIEGVRIVGPADAEARGGAVSFTVDGIHPHDVGQVLDDLGVAVRVGHHCAWPLHRRFEAVATTRASFYLYNSFADVDALAEGIREAQRFFGVARS

SEQ ID NO: 743 - DNA, 1236 bp, Acidothermus cellulolyticus
atggcgttcgacgtcgacgtcgtgcggaaggattttccgatccttgagcgcacggtgcgggatggacggccgctggtctacctcgacagtgccaacacgtcgcagaagccgcgcgccgtcctcgacacgctcaccgccttctatgaacggcacaacgcgaacatccaccgcgcgacccacgccctgggcgaagaggcgaccgaggcgtacgagaccgcgcggatgaaggtcgcggacttcatcggtgccggtgcagcggaagaggtcgtcttcgtcaagaactcctcggaggcgctcaacctggtagccaatgtgctgagctgggggccgcgggcggtcggtcccggtgacgagatcgtcatcaccgagatggagcaccactcgaacatcgtgccctggcagatcctctgtgagcggaccggcgcccggctccgctggttcggcgtcaccgatgacggccgcctcgacctggacggcatggacgacctgctcaccgagcgcacccgggtcctcgccgtcgtccacgtttcgaacgtcctgggcacggtgaacccgatcccgctccttgccgaacgcgcccaccaggtaggggcgctcgtggtcgtcgatgcgtcgcagtccgtcccgcacatgccggtggatgtggccgcgttgggcgcggacttcctggctttcaccgggcacaagatgtgcggaccgaccggcatcggcgtgctctggggacgccgcgacctgctcgaggagctgccgccgttcctcggcggcggcgaaatgatcgagacggtcaccatggagaagtccacgtacgccgccgtgccgcacaagtacgaggccggcacaccgccgatcgcgcaagcggtgggactcggcgccgcggtcgattacctgcgcagcatcggcatggaccagatcgcggcgcacgagcgggagctcaccgcgtacgccctcgggcggctcacggaacttcccggcgtgcgcatcctcggcccgacggaagcggtcgaccgggggagcgcgatctcgttcgtggtggacggcgtccacccccacgacgtcgcccaagtgctggatgcgcacggcgtggcagtccgcgccggccaccactgcggccggccgatccacctgcgcttcggggttgccgcgtcgacccgcgcatcctcgtacctgtacaccaccgagggggagatcgacgccctcgtcacgggattgcacgcggtgcggaggttcttcgcctga

SEQ ID NO: 744 - protein, 411 aa, Acidothermus cellulolyticus
MAFDVDVVRKDFPILERTVRDGRPLVYLDSANTSQKPRAVLDTLTAFYERHNANIHRATHALGEEATEAYETARMKVADFIGAGAAEEVVFVKNSSEALNLVANVLSWGPRAVGPGDEIVITEMEHHSNIVPWQILCERTGARLRWFGVTDDGRLDLDGMDDLLTERTRVLAVVHVSNVLGTVNPIPLLAERAHQVGALVVVDASQSVPHMPVDVAALGADFLAFTGHKMCGPTGIGVLWGRRDLLEELPPFLGGGEMIETVTMEKSTYAAVPHKYEAGTPPIAQAVGLGAAVDYLRSIGMDQIAAHERELTAYALGRLTELPGVRILGPTEAVDRGSAISFVVDGVHPHDVAQVLDAHGVAVRAGHHCGRPIHLRFGVAASTRASSYLYTTEGEIDALVTGLHAVRRFFA

SEQ ID NO: 745 - DNA, 1245 bp, Methylococcus capsulatus
atgaacaccgcccccgccgccgtcccggctttcgacgtagcccggatcaggacggacttcccgatcctcggacagcaggttcacggcaagccgctggtctatctggacaacgccgccaccgcccagaaacccaaggcggtgctggactgcatcgcgcatgtgtacggggaggactacgccaacgtccaccgcggcgtacacaccctgagccagcgcgccacggagttgttcgagggggcacgggaaaaggtgcagcgccacctcaacgcccgccattcgcacgagatcgtcttcacccgcggcaccaccgaggcgatcaacctggtcgcccagtcctacggacggccacgcttcaaggcgggggacgaaatcctcatcacggccatggagcatcattccaacatcgtgccctggcagatgctgtgcgagcagaccggcgccgtgctgaaggtcgtcccgatcgaccgcaccggcaccctggaactggaccggttcgaagccctgctgtcgaaccgtacccggctgctggcggtggcgcacatgtcgaacgcgctgggcacgatcaacccggtggaaacgctgatcgaacaggcccatcgccgcggcgtgccggtgctggtcgacggcgcccaggcgataccgcacatggcggtggacgtgcaggcgctggactgcgatttctacgccttctccggccataagctgtatggccccgccggcatcgggatcctgtacggcaaggaagagttgctgaacaagatgccgccctatcagggaggcggcgacatgatccgccgggtgaccttcgagaagaccgaatacaacaccctgccctacaagttcgaagccggcacgccgagcatcgtcgacgccatcgccctgggtgccgccatcgactatgtgaacggcataggcatggaaaccatagccggacacgaacagcggctgctggcctacgccaccgaacaggcgctacgcatcccgggcttagagctgttcggccaggccgccgagaagggtgccatcctgtcgttcaccctgcaccgcatccacccccacgacatcggcacgatcctggatcacctcggcatcgccatccgcgccgggcatcattgcgccatgccggtgatggactttttcggcattcccgcgacggcgcgggcgtcgttcgggctttacaacactttcgaagaggtagacgcgttgatcgcaggcatccacaaggtcatcgaggtattcggctga

SEQ ID NO: 746 - protein, 414 aa, Methylococcus capsulatus
MNTAPAAVPAFDVARIRTDFPILGQQVHGKPLVYLDNAATAQKPKAVLDCIAHVYGEDYANVHRGVHTLSQRATELFEGAREKVQRHLNARHSHEIVFTRGTTEAINLVAQSYGRPRFKAGDEILITAMEHHSNIVPWQMLCEQTGAVLKVVPIDRTGTLELDRFEALLSNRTRLLAVAHMSNALGTINPVETLIEQAHRRGVPVLVDGAQAIPHMAVDVQALDCDFYAFSGHKLYGPAGIGILYGKEELLNKMPPYQGGGDMIRRVTFEKTEYNTLPYKFEAGTPSIVDAIALGAAIDYVNGIGMETIAGHEQRLLAYATEQALRIPGLELFGQAAEKGAILSFTLHRIHPHDIGTILDHLGIAIRAGHHCAMPVMDFFGIPATARASFGLYNTFEEVDALIAGIHKVIEVFG

SEQ ID NO: 747 - DNA, 1284 bp, Thauera sp.
gtgaacgctccgtgtgaccccggcgcgcagacgcccatcctggaccttgccgccgacttccccatcttgtcgcggccgttgcatggccgccgcctggcctacctggacaacggcgccaccacgcagaagcccgccgcggtgatcgaggccgaggcgcgcttctaccgcgagtccaacgccaacatccaccgcggcgtgcactggctgtcgcagcacgccaccgaactctacgacggcgcccgcgccacggtgcagcgcttcctcaacgccgcgcgcgccgacgagatcgtgttcacccgcggcaccaccgaggcgatcaacctggtggcgcagagctggggccggccacggctcgcggccggtgacgagatcctgctcagcaccatggagcaccactcaaacatcgtgccctggcagctcgtgtgcgagcagaccggcgcggtgctcaaggtgattccggtgcgggacaacggcgagctcgacatggcggccttcgcgggcctgctcggcgagcgcacgcggctgctggcgatcacccatgtgtcgaacgcgctcggcacggtcaatccggtggccgagatgacgcggcgcgcgcacgagatgggcgcggtcgtgctcgtggacggcgcgcaggcggtggcccaccaggcggtggacgtgcaggcgatcggatgcgacttctacgccttctcgggccacaagctctacggcccaaccggcgtcggcgcgctctacggccgcgccgagctgctgcgccacatgcccccctggcagggtggcggcgacatgatccgtaccgtcgccttcgacaacaccaccttcgccccgccgccgcagcgcttcgaggccggcacgcccaacatcgccggggcgatcgcgctggctgcggcgatcgactacgtccaaggcgtcgggctcgcgcgcatccacgtccacgagcaggccctgctcgactacggcacgcgcgcgctcgccgccatccccggggtacgcctggtcggcaccgcggagcgcaaagccggcatcctgtccttcctggtcgacggcatccacccgcacgacctcggcaccatcctcgacgccgagggtgtggcgatccgcgccgggcaccactgcgcgatgccactgatgacgcgcttcggcatccccggcaccgcgcgcgcctcgctcggcctctacaacggcctcgccgacctcgacgcgctggtcgcggcgatccacaaggcgcaggaactgttcggcacgcgcggcggcacggcgtctggcaacgggagagtggcatga

SEQ ID NO: 748 - protein, 427 aa, Thauera sp.
MNAPCDPGAQTPILDLAADFPILSRPLHGRRLAYLDNGATTQKPAAVIEAEARFYRESNANIHRGVHWLSQHATELYDGARATVQRFLNAARADEIVFTRGTTEAINLVAQSWGRPRLAAGDEILLSTMEHHSNIVPWQLVCEQTGAVLKVIPVRDNGELDMAAFAGLLGERTRLLAITHVSNALGTVNPVAEMTRRAHEMGAVVLVDGAQAVAHQAVDVQAIGCDFYAFSGHKLYGPTGVGALYGRAELLRHMPPWQGGGDMIRTVAFDNTTFAPPPQRFEAGTPNIAGAIALAAAIDYVQGVGLARIHVHEQALLDYGTRALAAIPGVRLVGTAERKAGILSFLVDGIHPHDLGTILDAEGVAIRAGHHCAMPLMTRFGIPGTARASLGLYNGLADLDALVAAIHKAQELFGTRGGTASGNGRVA

SEQ ID NO: 749 - DNA, 1257 bp, Streptomyces coelicolor
gtgacacagctgccgggcctcctcgacacagaggcgatccgcaaggacttccccatcctggaccgccaggtccacgacgggcacaagctcgtgtacctggacaacgcggcgaccagccagaagccgcggcaggtgctggacgcgctcagcgagtactacgagcgctacaacgccaacgtccaccgcggcgtgcacgtcctcgccgaggaggccacggcgctgtacgagggcgcgcgtgacaaggtcgcggagttcatcaacgcgccctcgcgcgacgaggtgatcttcaccaagaacgcctcggagtccctcaacctggtcgcgaacatgctgggctgggccgacgacccctaccgcgtggaccacgagaccgagatcgtcatcacggagatggagcaccactccaacatcgtgccgtggcagctgctggcgcagcgcaccggtgcgaagctccgctggttcggcctcacggacgacggccgcctggacctgtccaacatcgacgaggtcatcaccgagaagacgaaggtcgtctccttcgtgctggtctccaacatcctgggcacccagaacccggtcgaggcgatcgtgcgccgcgcccaggaggtcggtgcgctggtctgcatcgacgcctcccaggccgcgccgcacatgccgctggacgtgcaggccctccaggccgacttcgtggccttcaccggccacaagatgtgcggcccgaccggcatcggcgtgctgtgggggcgccaggagctcctcgaggacctcccgccgttcctcggcggcggcgagatgatcgagaccgtctcgatgcactcctccacctacgccccggccccgcacaagttcgaggcgggcacgcccccggtcgcccaggcggtcggtctcggcgcggcgatcgactacctcaactcgatcggcatggacaagatcctcgcccacgagcacgcgctgaccgagtacgccgtcaagcgcctgctggaggtcccggacctgcgcatcatcggccccaccacggccgaggagcgcggcgcggcgatctccttcacgctgggggacatccacccgcacgacgtgggccaggtcctcgacgagcagggcatcgcggtccgggtcggccaccactgcgcccgccccgtctgcctgcgctacggaattcctgcgaccacgcgagcgtcgttctatctgtactccacgccggccgagatcgacgcactggtcgacggcctggagcacgtacggaacttcttcggctga

SEQ ID NO: 750 - protein, 418 aa, Streptomyces coelicolor
MTQLPGLLDTEAIRKDFPILDRQVHDGHKLVYLDNAATSQKPRQVLDALSEYYERYNANVHRGVHVLAEEATALYEGARDKVAEFINAPSRDEVIFTKNASESLNLVANMLGWADDPYRVDHETEIVITEMEHHSNIVPWQLLAQRTGAKLRWFGLTDDGRLDLSNIDEVITEKTKVVSFVLVSNILGTQNPVEAIVRRAQEVGALVCIDASQAAPHMPLDVQALQADFVAFTGHKMCGPTGIGVLWGRQELLEDLPPFLGGGEMIETVSMHSSTYAPAPHKFEAGTPPVAQAVGLGAAIDYLNSIGMDKILAHEHALTEYAVKRLLEVPDLRIIGPTTAEERGAAISFTLGDIHPHDVGQVLDEQGIAVRVGHHCARPVCLRYGIPATTRASFYLYSTPAEIDALVDGLEHVRNFFG

SEQ ID NO: 751 - DNA, 1251 bp, Solibacter usitatus
atgagcacgctgagtagcacccctaccgccgcaagtttcgacgtggagaagatccgcgaggatttccccgtcctcaagcagaaggtccacggcaagccgcttgtctatctcgatagcgccgccaccgcccaaaaacccttggcagtgattgacgccatccgccgcttccacgaagtcgattgcgccaacatccaccgcggcgtccacgaactctcccagcgctccaccgctgcatatgaagagacccgcgccaaggccaaacgcttccttaacgctcgcagcaaggacgaattgatcttcgtccgcggcaccaccgagggcatcaatctcgtcaccagctcctggggccgccgcaacgtcaaggaaggcgacgagatcatcgtctccgccatggagcaccattccaacatcgtgccgtggcagatgctctgcctcgacacgggcgcgaatctccgcgtcatccccatgaacgagcgcggcgaactcattatggaggagtacgaaaagctcctcaatccgcgtaccaaaatggtcgctgtcgcccatgtctccaatgcgctcggcaccatcaaccccgtccgccagatcatcgaaatggcgcacaatgtcggcgcgctgaccctgatcgatggcgcccaggcggtcccccacgcgaaggtcgatctccaggcccttgacgccgatttctataccttcagcggccacaagatcgtcgggcccaccggcatcggcattctctacggaaagaccaaactcctcaacgccatgcccccctaccagggcggcggcgacatgatcaaagtagtcactttcgaaaaaaccacctacgccgacctgccctataagttcgaagccggcacgcccaatatcgccggcggcatcggccttggcgccgcgttggattacgtgaccgcactcggcattgaacagatcgccgcctacgaacaccaactgctcgagtacggcaccgaacagctctccggcattccaggcctgaggctgatcggcaccgcgaaggagaaggccagcgtgctctccttcgtcatcgaaggcattcaccctcacgacatcggcaccattctcgataaacagggaatcgccgtccgcacaggccatcactgcgcgcagcccgtgatggatttcttcaacgtcccggcgaccacccgcgcctcgctcgcgttctacaacacctttggcgaaatcgatgcgctcgtcggcggactcaaaaaggtaaaggagattttctcctaa

SEQ ID NO: 752 - protein, 416 aa, Solibacter usitatus
MSTLSSTPTAASFDVEKIREDFPVLKQKVHGKPLVYLDSAATAQKPLAVIDAIRRFHEVDCANIHRGVHELSQRSTAAYEETRAKAKRFLNARSKDELIFVRGTTEGINLVTSSWGRRNVKEGDEIIVSAMEHHSNIVPWQMLCLDTGANLRVIPMNERGELIMEEYEKLLNPRTKMVAVAHVSNALGTINPVRQIIEMAHNVGALTLIDGAQAVPHAKVDLQALDADFYTFSGHKIVGPTGIGILYGKTKLLNAMPPYQGGGDMIKVVTFEKTTYADLPYKFEAGTPNIAGGIGLGAALDYVTALGIEQIAAYEHQLLEYGTEQLSGIPGLRLIGTAKEKASVLSFVIEGIHPHDIGTILDKQGIAVRTGHHCAQPVMDFFNVPATTRASLAFYNTFGEIDALVGGLKKVKEIFS

SEQ ID NO: 753 - DNA, 1218 bp, Coxiella burnetii
atgcctaattcattaaacgtgcgtgacgatttccccctgttaaagcagcttattcatggaaagccgctggtttatttagacaccggcgcaacggcgcaaaaaccgcaagccgtgatggacgcggtgtctcattactattgtcaggataacgccaacgtgcacagaggcatttatgaattaagtgagcgtgcaacgagaaattacgaagaaagccgagagaaaattaaaacttttattaatgcagccgatgctcgtgaaattatttttactcacggcgccaccgggtccattaatttagtggcagccagttttggggcattgcaggttaaaaggggggatgaaatattaatttcggcgatggagcatcattcaaatattgtcccctggcaacttttgtgtgagcgtgtgaatgctaaattaaaggtaatcccagtcgatgataatggcgttttggatatcgatgcctatcagcgattattaacgaaacgcactaaattagtcggattaatacatatttctaatgtgttgggcacagttaacccagtgaaagacatgattcaattggctcatcaaaacaaaacccctgttttgctggatggtgcgcaggctatttctcaccgagaagtggacgttcaggatttggattgcgatttttacgtattttctagtcataaattatatggcccgacgggtgtcggcgttctttacggtaaagcaaaatggttagagactatgccgccttatcaaggtggcggcgatatgattagtcgagtgagctttgagaaaacggactataatgtagtgccttacaagtttgaagccggtacacccaatatgggtggcgttatcggtatgggtgcagcgattgattatgtaactcgtatcgggtttgaaaaaataaaacttcatgaaaatgaattaatgtgttacgccgccgaacaactgcaaaaaattcccggattaagaatcattggtaatgcgcctgataaagccagcgcgatttcttttgtaatggcgcaagcccacccgcatgatattagtacgattttagataatgaaggcattgccattcgagccggacatcattgtgcgatgccgttaatggatcgttttaatttacctgctaccgcgcgagtgacatttggaatttataatacaacgcaagacgtagatcggttggtggaagggttgcaccgagtgattcagttgtttggatag

SEQ ID NO: 754 - protein, 405 aa, Coxiella burnetii
MPNSLNVRDDFPLLKQLIHGKPLVYLDTGATAQKPQAVMDAVSHYYCQDNANVHRGIYELSERATRNYEESREKIKTFINAADAREIIFTHGATGSINLVAASFGALQVKRGDEILISAMEHHSNIVPWQLLCERVNAKLKVIPVDDNGVLDIDAYQRLLTKRTKLVGLIHISNVLGTVNPVKDMIQLAHQNKTPVLLDGAQAISHREVDVQDLDCDFYVFSSHKLYGPTGVGVLYGKAKWLETMPPYQGGGDMISRVSFEKTDYNVVPYKFEAGTPNMGGVIGMGAAIDYVTRIGFEKIKLHENELMCYAAEQLQKIPGLRIIGNAPDKASAISFVMAQAHPHDISTILDNEGIAIRAGHHCAMPLMDRFNLPATARVTFGIYNTTQDVDRLVEGLHRVIQLFG

SEQ ID NO: 755 - DNA, 1227 bp, Petrotoga mobilis
atgttatcttccaaagaatatgaggagatatttccagctttaaaaagaaaaataaatgggcataaattggtctatcttgacaatgctgccaccacgttaaggccaaaagaagttatggatgctgtaaatgaatacagcctcaaccatcattccaacgtccatagatcaacacataccttagcagctgaagcgactcagtattatgaagatgcaagaagtgaagttgcaaatttcataaacgctgaagccgaagaagttatttttacaaaaggtgcgactgaatctcttaatcttatagcttattccgttgcagtttcaaatattttgcaatctgatgacgaaattttgatatctacaatagaacatcatgcaaactttgttccctggcagcaaatagccaaaatttttaatttaaagataaaatactatcccgctaaaagtgggatttttgatttatctgattttctcaagcatattacaaataaaacgaggttagtaagtattaccgctttgtcaaacgttaccggtcaacttattccagttaatactttaataaaacaaattagaaatatcagacaagatgtaattattgttgtggatggggctcaagctgtacctcaccttcctatcgatgtaaaaaaaatggattgtgattttatagccttttctggccataagatgcttggacccacgggaataggtgtgttgtatggtaaaagaaagtatttaaacatgatgaccccttttttgtttgggggagaaatgatcgataaagtttctaccgatggaactacttttaacgtgttgccttacaaatttgaggcgggaactccaaacgttgacggagccgtaggattagctaaagccatagaaatacttgaaagtattggcatggataatattcaagaacatgataaacaactcacctcttatgcattgaaaaaattaaaagagttagattttttagaaatattcggccctcaagacgaaacgcagcagtcaataatatccttcaatatgaaaggtgttcatccacacgatgtagcgcatatgttgaacgatttgactggaatagccattagaagcggtcatcattgtgcacagccattgatgaaagagtttggtacaaccgccacttgtagggtaagcttctatttgtataacgaagaagaagatgttgataaattatgtgaaggattaaaaaaggtttgggagtggttaaaatag

SEQ ID NO: 756 - protein, 408 aa, Petrotoga mobilis
MLSSKEYEEIFPALKRKINGHKLVYLDNAATTLRPKEVMDAVNEYSLNHHSNVHRSTHTLAAEATQYYEDARSEVANFINAEAEEVIFTKGATESLNLIAYSVAVSNILQSDDEILISTIEHHANFVPWQQIAKIFNLKIKYYPAKSGIFDLSDFLKHITNKTRLVSITALSNVTGQLIPVNTLIKQIRNIRQDVIIVVDGAQAVPHLPIDVKKMDCDFIAFSGHKMLGPTGIGVLYGKRKYLNMMTPFLFGGEMIDKVSTDGTTFNVLPYKFEAGTPNVDGAVGLAKAIEILESIGMDNIQEHDKQLTSYALKKLKELDFLEIFGPQDETQQSIISFNMKGVHPHDVAHMLNDLTGIAIRSGHHCAQPLMKEFGTTATCRVSFYLYNEEEDVDKLCEGLKKVWEWLK

SEQ ID NO: 757 - DNA, 1263 bp, Synechocystis sp.
atggttgctctccaaattcccagccttgccgccactgtccgccaagattttcccatcttaaatcaagaaattaatggccatcccctggtgtatttggacaatgccgccacctcccaaaaaccccgggctgtgctggaaaaattgatgcattactatgaaaacgataatgctaatgttcaccggggagcccatcaactaagtgtgcgggctactgatgcctacgaagcagttcggaataaagtggcaaaatttattaatgcccgatcgccaagggagattgtttacactcgtaacgccacggaagcgattaatttggtggcctatagctgggggatgaataatctcaaagcaggggatgaaatcattaccaccgtgatggaacatcacagcaatttagtgccttggcaaatggtggcggccaaaaccggggctgtactaaaatttgtccaattagacgagcaagaaagctttgatttagaacattttaaaactctactttctgaaaagactaagttggtcactgttgttcacatttctaacaccttgggctgcgttaacccggcggaagaaattgcccaattagcccaccaagctggggctaaagtgttagttgacgcctgccaaagtgcgcctcattaccctctggacgtacaactaattgattgtgattggttagtggccagtggtcacaaaatgtgcgctcccacgggcattgggttcctttacggcaaagaagaaatcttagaagccatgcctcccttttttggcggcggcgaaatgattgctgaagtcttttttgatcatttcaccactggagagttgccccacaaatttgaagcggggaccccggccattgccgaggcgatcgccttaggagcggcagtggattatttaaccgacttagggatggaaaatattcataactatgaagtggaattaacccattacctctggcaaggcttggggcaaattccccaactgcgactttacggccccaatcccaaacacggcgatcgggccgctttagcgtcctttaacgtggcgggactccacgccagcgacgtggccaccatggtggatcaagacggtatcgccatccgttccgggcaccattgcacccaaccgttgcaccgattgtttgacgcttccggcagtgctagggccagtctgtatttctacaacaccaaagaagaaattgacctatttttacaatctttgcaagcaaccattcgcttctttagtgatgacgactttaccgtttaa

SEQ ID NO: 758 - protein, 420 aa, Synechocystis sp.
MVALQIPSLAATVRQDFPILNQEINGHPLVYLDNAATSQKPRAVLEKLMHYYENDNANVHRGAHQLSVRATDAYEAVRNKVAKFINARSPREIVYTRNATEAINLVAYSWGMNNLKAGDEIITTVMEHHSNLVPWQMVAAKTGAVLKFVQLDEQESFDLEHFKTLLSEKTKLVTVVHISNTLGCVNPAEEIAQLAHQAGAKVLVDACQSAPHYPLDVQLIDCDWLVASGHKMCAPTGIGFLYGKEEILEAMPPFFGGGEMIAEVFFDHFTTGELPHKFEAGTPAIAEAIALGAAVDYLTDLGMENIHNYEVELTHYLWQGLGQIPQLRLYGPNPKHGDRAALASFNVAGLHASDVATMVDQDGIAIRSGHHCTQPLHRLFDASGSARASLYFYNTKEEIDLFLQSLQATIRFFSDDDFTV

SEQ ID NO: 759 - DNA, 1269 bp, Ralstonia eutropha
atgaacacggctgcgcatgaacggatggccgtggagcacgcggtgccggccgccagcctggaggtggagcggctgcggaaggatttcccgatcctgcgccagaccatcaacggcaggccgctggtctatctggacaacgccgccaccacccagaagccgcaaagcgtgatcgattgcgaagcgcattactacgccgcgctcaacgccaatatccaccgcggcgtgcataccctgagccagcgcgccaccgatgcctacgaggccgcgcgcgacgcagtgcgagacctgatcaacgccgccgggcgcgaggaaatcgtgttcgtgcgcggcaccaccgaggccatcaacctggtggcggcaagcttcggccagcgcctgcgcccgggcgacgaggtcctgatcagcgcgatggagcaccactccaatatcgtgccgtggcaactggcgtgccagcgcaccggcgccttgctgcaggtggcgccgatcaacgatgccggcgagctgatgctggagcagttcgcgcgattgctcggcccgcgcaccagactggtcgcgctgacgcacctctccaacgcgcttggcaccgtcaacccggtgcggcacatcatcgagctggcgcatgaccatggcatcccggtgctgatcgatggcgcccaggccgtgccgcacctaaaggtcgacgtgcaggccctcgattgcgatttctacgcgttctccgggcacaagctttacgggcccaccggcgtcggcgtgctctacggcaaggccgcgctgctcgatgccatgccgccttaccagggcggcggggacatgattcgcgaggtcacgttccgcaagaccacatacaacgagctgccctacaagttcgaggcgggcacccccaatatcgccggcgtcatcgcccttggcgccgccatcgggtacgtgcgcgcgctcggcctggaagccatcgccgcccacgagcacgcgctgctcgcttacgccagcgcgcaggcagcaaggatcgccggcctgcgcatgatcggcacggctgccgacagggcgagcatcctctcgttcacgctggacggcatccatccccacgatgtcggcaccatcctcgatcagcacggcgtcgcggtccgtgccggccaccattgcgccatgccggtgatggagcgcttcggcgtgcccgccacggtgcgcgcttccttcgcgctgtacaacacgcgtgaagaggtggatgcactgtttgctgccgtgcgcgcggcacaggaggtattcgcctga

SEQ ID NO: 760 - protein, 422 aa, Ralstonia eutropha
MNTAAHERMAVEHAVPAASLEVERLRKDFPILRQTINGRPLVYLDNAATTQKPQSVIDCEAHYYAALNANIHRGVHTLSQRATDAYEAARDAVRDLINAAGREEIVFVRGTTEAINLVAASFGQRLRPGDEVLISAMEHHSNIVPWQLACQRTGALLQVAPINDAGELMLEQFARLLGPRTRLVALTHLSNALGTVNPVRHIIELAHDHGIPVLIDGAQAVPHLKVDVQALDCDFYAFSGHKLYGPTGVGVLYGKAALLDAMPPYQGGGDMIREVTFRKTTYNELPYKFEAGTPNIAGVIALGAAIGYVRALGLEAIAAHEHALLAYASAQAARIAGLRMIGTAADRASILSFTLDGIHPHDVGTILDQHGVAVRAGHHCAMPVMERFGVPATVRASFALYNTREEVDALFAAVRAAQEVFA

SEQ ID NO: 761 - DNA, 1242 bp, Thermotoga maritima
atgttgtcaacaggattgtatgaggactttcccaccctgaagatgaagattaacggaaaaaggatcgtttatctggacagcgcagccactacactgaagccaaaacaggtcgtgaaaaagctggaagaattctactacaacagctacgcgaacgttcacagagcggttcacactctcgctgtgcgtgccaccaccgaattcgaggaaaccagggaggagttcgcagagtttttaggtgcttctccagaggagataatcttcacctcgggcaccaccatggccataaatctcgctgtggtgtcccttctgaggagtggcatattgaaagaggacgatctggttctggtttcccttctggaacaccacgcgaactttgtcccctggctcagactttcgaaattccatgggtacaggatcgacttcatcagaccctcgggaagattcggaacactcgagatggatgacctgttgaaacacagagacaaaaacccgaaagtcgttgccataacaggcctttccaacgtgaccggccagagaatacccgttgaagagctgagaaacgtctttcctaattccatcattctcctggatggtgctcaactgatacctcatgaaccagtgaaaccgaaggagataggagtagattttcttgccttttcactccataagatgctcggtcccaccggtgtaggtgtgctttacggaaagagagaagtgctggaacagatggaaccgtttctctacggcggagagatgatcgacagagtgtccctcgaagatgtcacattcaacgaattaccttacaagttcgaagcgggaactccgaacatagcggatatagtcgcatccagggaagccctgaggtatctgaaggaaacaggtttcgattcagttcatgaaaagatagaacagctcactcagatggccttgaaagagatgatgaaaatcggcggagtggaaatctacggcccactcgacgaaagacagcatgggatagtctcgttcaatgtaaagggaatacacccgcacgatgtggcccacattctcgatcaggagtttggaatagccgtaaggagtgggcaccactgcgcacagcctctgatgagtattttgaaagaacagtcgcaaatcgattttccaaactccacctgcagagccagtttttacatctacaacacggaagaagatgttaaaattctcgttgaaggtgtgaaaaaagtaaaggagtggttttcaagatga

SEQ ID NO: 762 - protein, 413 aa, Thermotoga maritima
MLSTGLYEDFPTLKMKINGKRIVYLDSAATTLKPKQVVKKLEEFYYNSYANVHRAVHTLAVRATTEFEETREEFAEFLGASPEEIIFTSGTTMAINLAVVSLLRSGILKEDDLVLVSLLEHHANFVPWLRLSKFHGYRIDFIRPSGRFGTLEMDDLLKHRDKNPKVVAITGLSNVTGQRIPVEELRNVFPNSIILLDGAQLIPHEPVKPKEIGVDFLAFSLHKMLGPTGVGVLYGKREVLEQMEPFLYGGEMIDRVSLEDVTFNELPYKFEAGTPNIADIVASREALRYLKETGFDSVHEKIEQLTQMALKEMMKIGGVEIYGPLDERQHGIVSFNVKGIHPHDVAHILDQEFGIAVRSGHHCAQPLMSILKEQSQIDFPNSTCRASFYIYNTEEDVKILVEGVKKVKEWFSR

SEQ ID NO: 763 - DNA, 1254 bp, Gloeobacter violaceus
atgaccttcaccgcccaagctcaccggaccctgactcccgccgccgtcgaacgcctgcgcgccgattttccgattttgcgccagaccgtctacggcaagccgctggtttacctggacaacgccgccaccacccagaagccccaggcggtgctcgacgccatcgccgcactctacaccggctattactcgaacatccaccgcggcgtgcaccacctcagtcagctttctaccgaagcccacgaacaggcccgcatcaaggtgcagcaatttataaacgcccagagcgatcgcgagatcgtcttcgtgcgcggctgcaccgaggggatcaacctggtggcccagacgtttggccgcgagcgcgtcggtccgggcgacgagattgtcatttccgccatggagcaccactccaacatcgttccctggcagatgctctgccaggaaaaaggagcgatcctcaaagtggcgcccatcgacgatcgcggcgaaatcatccttgaagccttcgagcaactcctgggcgagcgcacgaagctggtggcggtggtgcacctgtcgaacgctctgggtacgattaacccggtggcgcgcttgattgaactggcccacacccgcggcattccggtgctggtggacggcgcccaggcggtgtcccatattgccgtggacgtgcaggcgctcgactgcgacttttacgttttctcgggccacaagctctacgcgcctaccggcatcggcgtgctctacggcaaggcggaactgctggaggcgatgtccccctggcagggcggcggagacatgatccgctcggtcagcttcgagaagacgatctacagcgacttgccctacaaattcgaagcgggtaccccggacatcgccggggccatcgccctgggtgttgccgtcgactatgtgcagcacatcggcctggaggcgattgcaggctacgagcaggaactgctcgattacgccaccgaagcgctcagcgccatcgacggcgtcaagctcatcggtaccgcccgcgataaggcgagcgtgctttcttttgtgctggccggggtccatccccacgacatcggcacgattctcgaccgcaaaggcatcgccgtacgggcgggccaccactgcgcccagccggtgatgcagcgcttcaaggtgccggccaccgcccgcgcctcgttcgccttttacaacacccgcgccgaggtcgatgcgctggtggcggcaatccaacaagtgcaggagatgtttagctga

SEQ ID NO: 764 - protein, 417 aa, Gloeobacter violaceus
MTFTAQAHRTLTPAAVERLRADFPILRQTVYGKPLVYLDNAATTQKPQAVLDAIAALYTGYYSNIHRGVHHLSQLSTEAHEQARIKVQQFINAQSDREIVFVRGCTEGINLVAQTFGRERVGPGDEIVISAMEHHSNIVPWQMLCQEKGAILKVAPIDDRGEIILEAFEQLLGERTKLVAVVHLSNALGTINPVARLIELAHTRGIPVLVDGAQAVSHIAVDVQALDCDFYVFSGHKLYAPTGIGVLYGKAELLEAMSPWQGGGDMIRSVSFEKTIYSDLPYKFEAGTPDIAGAIALGVAVDYVQHIGLEAIAGYEQELLDYATEALSAIDGVKLIGTARDKASVLSFVLAGVHPHDIGTILDRKGIAVRAGHHCAQPVMQRFKVPATARASFAFYNTRAEVDALVAAIQQVQEMFS

SEQ ID NO: 765 - DNA, 1260 bp, Nitrococcus mobilis
atgagcacggtcaatccagtgcaggagcatgccgcagtcgcacctcttgcggtggagcgcatacgagcggactttccgatcctcgctcagccgatgaacggcaagcggttggtatttctggatagcgcagccagcgcacagaagcctgtagccgtgatccgggcgatcgaggagtgctaccagaactattatgcaaatattcaccgtggcgtctaccaactctcacagcgatccacgcaggcgtatgaggcagtgcgtggcaaggttcgagcgctgctcaacggcgctgacgaccgggaagtggttttcgttcgcggtgccaccgaggctattaatctggtggcgcatagttatgtgcggccccggttgggtcccggcgatgaaattctgattacgggtatggagcatcattccaatatcgtcccctggcagttgttgtgtgagcaagcgggcgccacgctcgtggtttcgccgataacggatacgggtgaggtggatttagaggattttcgcagccgactcacggcgcgaacgaagttcgtcagcgtggtacacgtttccaatgccttgggtaccgtcaacccagtgcaggagatgatcgccgcggcacatgagcgtggtgcggcagtgctggtcgacggcgcccagtcagttcctcatctgtcagtggatgtggccgagttaggctgtgatttttactgtttctcgggccacaagatttatgggccctccggggtgggcgttttatggggacggttggatctactgcgtgaaatgccgccgtatcagggcggtggcgagatgatccgctacgtcaccttcgagcgcagcgaatttgctgagccgccgcaacgcttcgaggccggtactccgaatatcgccggtgtcgtcggtttaggtgcggcgatcgattatgttcatgccatcggtacggagcgggtcgccgctcatgagcatgccctgctcgattatgccacggcgcggcttggtgaagtagaaggcgtgcgcattattggcaccgcggccgccaaggcgggggttatctcctttgtgctgggacgcgtgcacccgcatgacatcgggacggtgttggatctggaaggggtggcgattcgggcgggccatcattgtgcgcaacccgtgatgcagcgctacggcatagcggctacagcccgagcctcgttcggagtgtacaacacttacgatgacgtggatgcgctcgtgcgcgcactgggcaaggttagggagttgtttatctga

SEQ ID NO: 766 - protein, 419 aa, Nitrococcus mobilis
MSTVNPVQEHAAVAPLAVERIRADFPILAQPMNGKRLVFLDSAASAQKPVAVIRAIEECYQNYYANIHRGVYQLSQRSTQAYEAVRGKVRALLNGADDREVVFVRGATEAINLVAHSYVRPRLGPGDEILITGMEHHSNIVPWQLLCEQAGATLVVSPITDTGEVDLEDFRSRLTARTKFVSVVHVSNALGTVNPVQEMIAAAHERGAAVLVDGAQSVPHLSVDVAELGCDFYCFSGHKIYGPSGVGVLWGRLDLLREMPPYQGGGEMIRYVTFERSEFAEPPQRFEAGTPNIAGVVGLGAAIDYVHAIGTERVAAHEHALLDYATARLGEVEGVRIIGTAAAKAGVISFVLGRVHPHDIGTVLDLEGVAIRAGHHCAQPVMQRYGIAATARASFGVYNTYDDVDALVRALGKVRELFI

SEQ ID NO: 767 - DNA, 1176 bp, Pediococcus pentosaceus
atgatagatgatcaaaaaatagcctatttagataatgcagcgaccatgccgatgccagacgaagtattggaagtaattgatatgtactaccatgcccataaagttaatgtgcatcggggaatgtatcgattagctcaccaagttacggaacaatatgaagcagttcgtcaagccacggctgattttatcaatgctcaggactcctcggagattatttttaccagtggtacgaccgatgccctaaatttagttgcttttggttatgcggaaaaacaacttcaaccagacgatgaaattattatcagtgttttagaacaccattcgaacttcattccgtggcaacgcgtggctcataaaacgggcgcaaaattgaaaattgtcggtttagatgaccaacagaatttagatatgcagcaattttccgaattgcttacggagaaaaccaagctagtcgccattacgttagtttctaatgtgctaggaagcattgtggatgccaagcaaattattgaacaaacgcatcatatggggggagtggttgtattagatgctgctcaagcagttggtcatctacccctagatgttcaaaaattagatgctgatttcttagccttttctggacataaaatgtatgggcctaccggagttggagttttatatggaaaacggaacttgttagaacaggttgcgcctttgcgatttggcggggaaatggctgatgaagttgatgctcaaacggcgacgtttcaaccgctccccctacggctagaagccggtacgcctaacattgccggagttttagggttgggggctgctattcaatatctacaaaagattggttttacaaccattcatcaacatgaacagcaattattaaatcagttataccaaggattacggcagataccagcaattaaagtttatggtccaaggtctgcggccgagcgccaaggggtgcttagttttaactatggaactattcatgcccatgatgtagcgaccattattgataccgaaaatgtagcggttagagccggacatatgtgtgcggaacctttaatgcaagctctaggagtaagtagcgtcgtccgggccagtgtttcgtatatgaacacgacgagggatgtcgaacagcttttagcagcaatgaatcaggtgggtcaaattttattatga

SEQ ID NO: 768 - protein, 391 aa, Pediococcus pentosaceus
MIDDQKIAYLDNAATMPMPDEVLEVIDMYYHAHKVNVHRGMYRLAHQVTEQYEAVRQATADFINAQDSSEIIFTSGTTDALNLVAFGYAEKQLQPDDEIIISVLEHHSNFIPWQRVAHKTGAKLKIVGLDDQQNLDMQQFSELLTEKTKLVAITLVSNVLGSIVDAKQIIEQTHHMGGVVVLDAAQAVGHLPLDVQKLDADFLAFSGHKMYGPTGVGVLYGKRNLLEQVAPLRFGGEMADEVDAQTATFQPLPLRLEAGTPNIAGVLGLGAAIQYLQKIGFTTIHQHEQQLLNQLYQGLRQIPAIKVYGPRSAAERQGVLSFNYGTIHAHDVATIIDTENVAVRAGHMCAEPLMQALGVSSVVRASVSYMNTTRDVEQLLAAMNQVGQILL

SEQ ID NO: 769 - DNA, 1269 bp, Streptomyces griseus
gtgactgacgcccgacaggggctcaccggcctcctcgacaccgaggcgatccgcaaggacttcccgctcctggaccgcacggtccacgacggcaagaaggtcgtgtacctggactccgcggcgacctcgcagaagccgcgccaggtcctcgacgcgctcaacacgtactacgagcgccacaacgcgaacgtgcaccgcggcgtctacacgatcgccgaggaggccaccgcgctgtacgagggcgcccgcgacaaggtcgccgccttcatcaacgcacccagccgcgacgaggtgatcttcacgaagaacgcctcggagtcgctgaacctcgtggcgaacatgctcggctgggcggacgagccctatcgggtggaccgcgagaccgagatcgtcaccacggagatggagcaccactccaacatcgtgccgtggcagctgctcgcgcagcgcaccggcgcgaagctgaagtggttcggcatcaccgacgacggccggctcgacctgtcgaacatcgacgagatcatcaccgagaagacgaagatcgtctccttcacgctggtctccaacatcctgggcaccgtcaacccggtcgagcagatcatccgccgcgcccagcaggtcggcgcgctggtctgcatcgacgcctcgcaggcggccccgcacatggtgctcgacgtgcaggcgctccaggcggacttcgtggccttcaccggtcacaagatggtcggcccgacgggcatcggcgtgctgtggggacggcaggagctcctggaggacctgcctccgttcctcggcggcggcgagatgatcgagaccgtgtcgatgcactcctcgacgtatgctccggcaccccacaagttcgaggccggtacgcccccgatcgcccaggccgtcggcctcggcgcggccgtggactacctctcctcgatcggcatggagaagatccacgcccacgagaaggcgatcaccgagtacgcggtgaagcgcctcctggaggtcccggacctgcggatcatcggtccggcgacggccgaggaccgcggggccacgatctccttcacgctcggcgacatccacccgcacgacgtgggacaggtcctcgacgagctgggcatcgccgtccgggtcggccaccactgcgcccgcccggtctgcctgcggtacggaattcccgcgacgacgcgagcgtcgttctatctgtactccacgcccgccgaggtcgacgccctggtggacggtctggagcacgtccggaacttcttcggctga

SEQ ID NO: 770 - protein, 422 aa, Streptomyces griseus
MTDARQGLTGLLDTEAIRKDFPLLDRTVHDGKKVVYLDSAATSQKPRQVLDALNTYYERHNANVHRGVYTIAEEATALYEGARDKVAAFINAPSRDEVIFTKNASESLNLVANMLGWADEPYRVDRETEIVTTEMEHHSNIVPWQLLAQRTGAKLKWFGITDDGRLDLSNIDEIITEKTKIVSFTLVSNILGTVNPVEQIIRRAQQVGALVCIDASQAAPHMVLDVQALQADFVAFTGHKMVGPTGIGVLWGRQELLEDLPPFLGGGEMIETVSMHSSTYAPAPHKFEAGTPPIAQAVGLGAAVDYLSSIGMEKIHAHEKAITEYAVKRLLEVPDLRIIGPATAEDRGATISFTLGDIHPHDVGQVLDELGIAVRVGHHCARPVCLRYGIPATTRASFYLYSTPAEVDALVDGLEHVRNFFG

SEQ ID NO: 771 - DNA, 1260 bp, Nitrosospira multiformis
atgaaaatcatagattccacgctgcaacctcagattgattcgacgctcgacgtcgcacgtgtgcgtgccgattttccgattctggagcttcaggtcgaaggaaagccgctggtctacctcgataatgcagcctccagccagatgccgcagcccgtgatcgatcgcctggtgcgttaccagacaaggcagcacgcaaatatcaatcggggtgtgcattatttatccgaaactgccacggcagaatatgaggcggcgcgctgtaaattgcagcgcttcatcaatgcgcgtgaagacagggaggtcatctttaccagcgggacgacagattccatcaaccttgtgatgcacgggtatggacgcaaattcatcggcgcgggtgatgaaatcatcctgactaccttggagcatcattcgaatatcgttccatggcagatgctggcggaagaaaaaggggcaaggatacgtgtcgtgccgatcaacgacgccggtgaacttctcatcgatgattatgagaagcttttcaacgagcgtacgaagttcgtgggtgtgatgcacgtatcgaatgctttggggacgatcaacccggtcagggaaatgatcgccttcgcgcatgcccgcggtgttccggtgctggtggatggcgcgcaggctgcgccgcatatgaaagtggatgtccaggagctcgactgcgatttctatgcattttcgggacacaaaatgtgtggcccgacaggcattggtattctgtacggaaaagcggaactcctggagcgcatgcagccgttcaaaggcggcggcgacatgattctatcggtgacattcgaaagaaccacctacaattccattccacacaaattcgaagcaggaactccgcccattgcagccgctatcgggcttggcgctgccgtcgattatttatcgaatgtcggcatcaatgccatcgccgcgtacgagattgagctgctcaattacgcaaccgaacagatactccagatacccggagtgcgcatcataggcacagcagcgaaaaaaaccgcggtgctgtctttcgaggtggcgggtgtgcatccgcacgatgtcggtacgcttttgaatcaggaaggcgttgccgttcgtaccggccatcactgcgtgcaacccgtgatgttgcgcctcaaggtgcctgccactacacgcgcttcatttgcgttttataatacaatggctgaggtagatactttcatcgctggcattcgtactgtgcaaaagatatttatttaa

SEQ ID NO: 772 - protein, 419 aa, Nitrosospira multiformis
MKIIDSTLQPQIDSTLDVARVRADFPILELQVEGKPLVYLDNAASSQMPQPVIDRLVRYQTRQHANINRGVHYLSETATAEYEAARCKLQRFINAREDREVIFTSGTTDSINLVMHGYGRKFIGAGDEIILTTLEHHSNIVPWQMLAEEKGARIRVVPINDAGELLIDDYEKLFNERTKFVGVMHVSNALGTINPVREMIAFAHARGVPVLVDGAQAAPHMKVDVQELDCDFYAFSGHKMCGPTGIGILYGKAELLERMQPFKGGGDMILSVTFERTTYNSIPHKFEAGTPPIAAAIGLGAAVDYLSNVGINAIAAYEIELLNYATEQILQIPGVRIIGTAAKKTAVLSFEVAGVHPHDVGTLLNQEGVAVRTGHHCVQPVMLRLKVPATTRASFAFYNTMAEVDTFIAGIRTVQKIFI

SEQ ID NO: 773 - DNA, 1326 bp, Frankia sp.
atgaccgtcgtcgagacacgcgcggcgggggccggcgcgcacgccggcgccgggttcgacgtcgagcgggtccgtcgcgacttcccgatcctcgcccgcacggtgcacgacggcctgccgctggtctacctcgacagcgccgcgacgtcgcagaagccgctggccgtcctcgacgccgagcggacctactacgagcggcacaacgccaacgtgcaccgcggcatccacgtgctcgccgaggaggccacggccctctacgaggagtcccgggacaagatcgcggcgttcgtcggcgcgcccgaccggcgcgagatcgtgttcacgaagaactcctcggaggcgctgaacctcgtcgcctacgcgatgagcaacgccgtcacgggcggccccgaggcggagcggttccggctcgggccgggcgacgaggtcgtcatcaccgagatggagcaccactccaacctggtgccctggcagatgctgtgcgcgcgcaccggcgccaccctgcgctggatcggtctcaccgaggacggccggctcgacctggcgcacctcgacgaggtcatcaccgaccgggcgaagatcgtctccttcgtgcaccagtcgaacatcctcggcacggtcaacccggtcgcgacgatcgtcgcccgggctcgtgaggtcggggcgctcaccgtgctcgacggctcccagtcggtgccgcacatgccgatcgacgtcgtcgacctcggggtggacttcctcgccttcaccgggcacaagatgtgcgggcccaccggcatcggcgtgctgtgggggcggcgcgagctgctcgaggtgatgcctccgttcctcggtggtggcgagatgatcgaggtcgtcaccatggaggcctcgacctacgcggccccgccgcaccgcttcgaggcgggcaccccgatgatctcccaggcgatcggcctgggtgccgcggtggactacctcaccggcctcggcatggacgcggtcgccgcgcacgagcacgagatcaccgcgtacgcgctcgacgcgctcgcgggcgtcccgggcctgcgggtcatcggcccgccgaccgccgagggccgcggcggggcgatctcgttcgccctgcgtgactccgaggaccgcccgctgcacccgcacgacgtcggccagatcctggacgagcagggcgtcgcggtgcgggtcggccaccactgcgcccgcccggtctgcctgcgctacggcgtgccggcgaccacccgggcctcgttccacctgtacacgaacaccgccgacgtcgacgcgttggtggaaggtctcgggcaggtcaggaggttcttcctgaagtga

SEQ ID NO: 774 - protein, 441 aa, Frankia sp.
MTVVETRAAGAGAHAGAGFDVERVRRDFPILARTVHDGLPLVYLDSAATSQKPLAVLDAERTYYERHNANVHRGIHVLAEEATALYEESRDKIAAFVGAPDRREIVFTKNSSEALNLVAYAMSNAVTGGPEAERFRLGPGDEVVITEMEHHSNLVPWQMLCARTGATLRWIGLTEDGRLDLAHLDEVITDRAKIVSFVHQSNILGTVNPVATIVARAREVGALTVLDGSQSVPHMPIDVVDLGVDFLAFTGHKMCGPTGIGVLWGRRELLEVMPPFLGGGEMIEVVTMEASTYAAPPHRFEAGTPMISQAIGLGAAVDYLTGLGMDAVAAHEHEITAYALDALAGVPGLRVIGPPTAEGRGGAISFALRDSEDRPLHPHDVGQILDEQGVAVRVGHHCARPVCLRYGVPATTRASFHLYTNTADVDALVEGLGQVRRFFLK

SEQ ID NO: 775 - DNA, 1242 bp, Propionibacterium acnes
atgagctacgacgtcgagaagatcaggaaagactttcccatcctgtccaccagggtgggggattacccgttgacgtacctcgactcggctaacacttcccaaaaaccccaggttgtcattgacgctctgagcgagcactacgcccgtcacaacgccaacgttgcacgggccatgcaccagctcgggttggagtccacccaggcttatgagggtgggcgggaacgcctcgcgcgttttatcggggcggcgcgccctgaggaagtggtggctctgtcgaacgcgtctgaagctcttaatttgtgcgcgtacaccctgggtgagcgtctcggacctgatgacgaggtcgtcatttcggtgatggagcaccactccaacttggttccgtggcagatcgtttgtcagcgcaccggtgccaccctgaggtgtttcgacatcactgatgacggccgcctcgacctcgagaaggctgaggcggaggggctcattaatgagcgcaccaaggtcgtctcgttgacgttggcctcgaacgtgctggggacgatcaatcccatcgggaagattgccgagcaggcccactccgtcggtgccgtcatggtcgtcgacgcgtctcaggccgtgcctcagatacctgtcgatatgacgaccttgggcgctgatttggtggccttcaccggtcacaagatgtgcggtccgacgggtatcggcattctctggggacgctatgacctcctcgctgagctaccgcccttcctcggaggcggcgagatgatcgaggtcgtgcgcatggagggatcgacctacgccgagcctccacatcgttttgaggcaggcaccccgccgatcgcacagctggctgccctcggggtggccgccgactacctagatggcatcgggatgcaggccatcgccgagcacgaacatgagctggctgctcggatgctcgaagagctccagaccgtcaagggagtgcacatcctcggaccaagcgacgccaccgctcgtaccggaacggtgtctttcaccatcgagggggtgcatccacatgacgcgatgagcatcatggatggtcatggcgttgcggtgcgaggcggtcaccactgcgccaggccgttgcatgagagattgggaatacagtcctccctccgtgcgtcgtcatacttgtactccactaccgacgaggtgaaccgcctcgtcgaatctgtcgagtacgctcggaacttcttcgccggaggtgtggcatga

SEQ ID NO: 776 - protein, 413 aa, Propionibacterium acnes
MSYDVEKIRKDFPILSTRVGDYPLTYLDSANTSQKPQVVIDALSEHYARHNANVARAMHQLGLESTQAYEGGRERLARFIGAARPEEVVALSNASEALNLCAYTLGERLGPDDEVVISVMEHHSNLVPWQIVCQRTGATLRCFDITDDGRLDLEKAEAEGLINERTKVVSLTLASNVLGTINPIGKIAEQAHSVGAVMVVDASQAVPQIPVDMTTLGADLVAFTGHKMCGPTGIGILWGRYDLLAELPPFLGGGEMIEVVRMEGSTYAEPPHRFEAGTPPIAQLAALGVAADYLDGIGMQAIAEHEHELAARMLEELQTVKGVHILGPSDATARTGTVSFTIEGVHPHDAMSIMDGHGVAVRGGHHCARPLHERLGIQSSLRASSYLYSTTDEVNRLVESVEYARNFFAGGVA

SEQ ID NO: 777 - DNA, 1260 bp, Rhodococcus sp.
atgaccacctcggtgcgcgtgttcgacgtcacccggatccgggaggacttcccgatcctggcgcgtacggtccgcgacggaaaaccgctggtgtacctcgattcgggcgcgacgtcgcagcgcccgaaccaggtgctcgacgccgagagggagttcctcaccacctgtaacgcggccgtgcaccgaggcgctcaccaactcgccgaagaggccaccgacgcgtacgagaacgcgcgcgcggcgatcgccgcgttcgtcggtgccgacagcgacgaactcgtgttcaccaagaacgcgacggaatcgctgaatctcgtcacccacgtcctcggcgacgaccgcttcgagcggcacctcggccccggcgacgagatcgtcatcaccgaactcgagcatcacgccaatctcgtgccgtggcaggaactcgcgcgcagtaccggtgcgacgctgcgctggtacggcgtcaccgacgacggccggatcgatctcgattcgctcgagctgaccgacgccgtcaaggtcgtggcgttcacccatcagtccaacgtcaccggggcggtggcacccgtcgaggaattggtgcgtcgcgcccgcgcggtcggtgcgctggtggtactcgacgcgtgccagtcggtcccgcacatggcggtggacttccacgcgctcggcgtggactacgcggccttctcggggcacaagatgctcggcccgtccggcgtcggtgtcctgtacggacgccgcgaactgctgaacgcgatgccgccgttcatcaccggtggttcgatgatcgagaccgtcacgatggaacgcaccacctacgcgccgccgccacagcggttcgaggcgggcgttccgatgacgtcgcaggtggtcgggctcggcgcagcagtccggtatctcgaggagatcgggatggacgcggtcgcggcgcacgagcacaccctggtcgaggcggcactggcggcgctcggtgccatcgacggcgtgcacatcatcggacccacgacggccgaggaccgcggcggggccgtgtcgttcgtggtcgacgggatccacgcacacgatctcggtcagatcctcgacgacgagggggtcgccatccgcgtcggccaccactgcgcctggcccctgcaccgtcgtttcggtgtcgcggccacggcgagggcgtcgttcgcgctgtacaacacggtcgacgagatcgacgcgctcgcggcggcggtgcggcgcgcacaggagttcttcggggaggttcctgcatga

SEQ ID NO: 778 - protein, 419 aa, Rhodococcus sp.
MTTSVRVFDVTRIREDFPILARTVRDGKPLVYLDSGATSQRPNQVLDAEREFLTTCNAAVHRGAHQLAEEATDAYENARAAIAAFVGADSDELVFTKNATESLNLVTHVLGDDRFERHLGPGDEIVITELEHHANLVPWQELARSTGATLRWYGVTDDGRIDLDSLELTDAVKVVAFTHQSNVTGAVAPVEELVRRARAVGALVVLDACQSVPHMAVDFHALGVDYAAFSGHKMLGPSGVGVLYGRRELLNAMPPFITGGSMIETVTMERTTYAPPPQRFEAGVPMTSQVVGLGAAVRYLEEIGMDAVAAHEHTLVEAALAALGAIDGVHIIGPTTAEDRGGAVSFVVDGIHAHDLGQILDDEGVAIRVGHHCAWPLHRRFGVAATARASFALYNTVDEIDALAAAVRRAQEFFGEVPA

SEQ ID NO: 779 - DNA, 1266 bp, Alkalilimnicola ehrlichei
atgagcacggttgaaccggttcgcgaccgggaacgggccgggccgccgctggacgtggcggccctgcgcgcccagttccccgtcctgcaccaacaggtgaacggctacccgctggtctacctggacaatgccgccagctgccagaagccggaggcggtgatcgaggccgaggcggcgtgttatcgcgagtactacgccaacatccaccgtggggtgcacgccctctcccagcgctgcaccaccgccttcgagggggcccgcgagaaggtgcagcggttcctgaacgccgagcgcgacggggagatcgtcttcctgcgcggcaccaccgaggccatcaatttggtggcccacagctacgtggagcccctgttgcagccaggcgatgagatcctcatcagctacctggagcaccactccaacatcgtcccctggcagatggtctgcgagcgcaccggggcggagctgcgggtcatcccggtacaggataacggcgaactggacctggaggccttccaggccctgctcagtgatcggacccgcttcctctccgtggggcacgtctccaatgccctgggcacggtgaacccggtgcgctggatgattgagcaggcccacgcccgggacatccccgtgctgctggacggcgcccaggcggtgcctcatggcccggtggatgtgcgcgagctggactgcgacttctacgccttctccgggcacaagctctatgggccgaccggggtgggggtgctctacgggcgccacgacctgctcaagggcatgcggccctggcagggcggtggcgacatgatccgcaccgtcagcttcgagaagaccctctacgccgaaccgcctgcccgcttcgaggcaggtacgcccaacatcgccggcgccatcgccctgggcgcggcggtggactgggtgcaggcggtgggcctggaggccatcgccgcccatgaggcccgcctgttggattacgccaccgagcggctgggtgcgttggagggggtgcggctactgggcacggccccggacaaggcggcggtgctctccttcgtgatggacgaggcccacccccacgatatcggcaccatcctcgaccaacagggggtcgccatccgcaccgggcaccactgtgccgagccggtgatgaaacgcttcaacgtgccggccaccgcccgcgcctccttcgcggcctacaacaccgaggccgaggtggatgcgctggtggagggcgttgagaaggtgcgcgaactgttcggcggctga

SEQ ID NO: 780 - protein, 421 aa, Alkalilimnicola ehrlichei
MSTVEPVRDRERAGPPLDVAALRAQFPVLHQQVNGYPLVYLDNAASCQKPEAVIEAEAACYREYYANIHRGVHALSQRCTTAFEGAREKVQRFLNAERDGEIVFLRGTTEAINLVAHSYVEPLLQPGDEILISYLEHHSNIVPWQMVCERTGAELRVIPVQDNGELDLEAFQALLSDRTRFLSVGHVSNALGTVNPVRWMIEQAHARDIPVLLDGAQAVPHGPVDVRELDCDFYAFSGHKLYGPTGVGVLYGRHDLLKGMRPWQGGGDMIRTVSFEKTLYAEPPARFEAGTPNIAGAIALGAAVDWVQAVGLEAIAAHEARLLDYATERLGALEGVRLLGTAPDKAAVLSFVMDEAHPHDIGTILDQQGVAIRTGHHCAEPVMKRFNVPATARASFAAYNTEAEVDALVEGVEKVRELFGG

SEQ ID NO: 781 - DNA, 1278 bp, Anaeromyxobacter sp.
atgatgggcgcgatcggcgagcggcggatcgaggcgggcgcgacgcggcggaccgggtccgcgttcgaccccgcgcgcgtccgcgaggacttccccatcctccggcagcgcgtccacggcaggccgctcgtgtacctcgacaacgccgcgaccacgcagaagccgcgggcggtcatcgacgcggtgagccgctactacgaggaggacaacgcgaacgtccaccgcggggtgcacctgctgtccgagcgcgcgacgcgcctgcacgaggacgcgcgcgcgagggtggcgcgcttcctcggcgcgccggatccgcgcgaggtgatcttcgtccgcgggacgaccgaggcggtgaacctcgtcgcgcagacgttcggccggacgcgggtgggggcgggcgacgaggtgctcgtcaccgagctcgagcaccactcgaacatcgtcccctggcagatgctctgccaggagaagggcgcgcggctgcgcgtcgtccccgtcacggacgcgggcgacctcgacctcgacgcgctcgaggcgctgctcgggccgcgcacgcggctcctctccgtcacccagctgtcgaacgcgctcgggacggtgactccgctcgccgagatcgtcgcccgggcgcacgcgaaggggatcccggtgttcgtggacggggcgcagggcgcgccgcacctcggcttcgacgtcgtctcctccggggcggacttctacgccttcagcgggcacaagctgtacggccccaccggcatcggcgtgctgtgggggcggcgcgagcacctcgaggcgatgccgccgtggcagggcggcggtgacatgatcctctccgtcacgttcgagaagaccgtctacaacgccctgcccttcaagttcgaggcggggacgcccgacatctcgggggcggtcgggctcgccgccgcgatcgactacgtggacgcgctcgggctcgaggcgatctccgcccacgaggcggccctcctcgcgcgcgcggtggaggcgctctcccaggagcaggacgtgcgcctcgtcggcgcgccgagcgtgcgcgccggggcgatctcgttcctcgtcggcgacgtgcacccgcacgacgtgggcacggtcctcgaccggcacggagtggcggtccgcgccgggcaccactgcgcccagccgctcatgcaccgcctcggcctccccgcgacggcgcgcgcgtcgttcggcctctacaacacctccgaggacgtggacgcgctcgtgcgcgggatccgcgcggtccgggagatgttcgcgtga

SEQ ID NO: 782 - protein, 425 aa, Anaeromyxobacter sp.
MMGAIGERRIEAGATRRTGSAFDPARVREDFPILRQRVHGRPLVYLDNAATTQKPRAVIDAVSRYYEEDNANVHRGVHLLSERATRLHEDARARVARFLGAPDPREVIFVRGTTEAVNLVAQTFGRTRVGAGDEVLVTELEHHSNIVPWQMLCQEKGARLRVVPVTDAGDLDLDALEALLGPRTRLLSVTQLSNALGTVTPLAEIVARAHAKGIPVFVDGAQGAPHLGFDVVSSGADFYAFSGHKLYGPTGIGVLWGRREHLEAMPPWQGGGDMILSVTFEKTVYNALPFKFEAGTPDISGAVGLAAAIDYVDALGLEAISAHEAALLARAVEALSQEQDVRLVGAPSVRAGAISFLVGDVHPHDVGTVLDRHGVAVRAGHHCAQPLMHRLGLPATARASFGLYNTSEDVDALVRGIRAVREMFA

SEQ ID NO: 783 - DNA, 1290 bp, SufSAnaeromyxobacter sp.
atgagcacggcggaggcacaggcggccggcggacgggcggcgcggccggaggcgcgcgacggcgcgcgcggcgcgttcgacgtcgagcgggtgcgggccgagttccccatcctggcgcggccggtgcgaggccagccgctcgcgtacctggacagcgccgccaccgcgcagaagccgcgcgcggtgatcgacgcggtccgccggtactacgaggaggacaacgcgaacgtgcaccgcggggtccacctgctctccgagcgcgccacccgcctctacgacggggcgcgcgtgaaggtggcccggttcctcggagcgagcgatccgcacgaggtggtgttcgtgcgcggcacgaccgaggcggtgaacctggtggcgcagacgttcgggcgccagcgggtcgggcccggcgacgagatcctcgtcaccgagctcgagcaccactcgaacatcgtgccgtggcagctcctctgccaggagaagggcgccacgctgcgggccgcgccggtgtcggacgcgggcgacctcgacgtggaggcgctcgaccggatgatcgggccgcgcacgcggctggtggcggtggcccacgtctcgaacgcgctcggcacggtgaacccggtggccgagatcgtggcgcgcgcgcacgcgaagggcgtgccggtgctggtggacggcgcccaggcggtgccgcacctcgcggtggacctgcccgcgctcggcgccgacttctacgcgttcagcggccacaagctgtacgggccgaccggcatcggggtgctgtgggggcgcaaggcgctcctcgacgcgctgccgccgtggcagggcggcggcgacatgatcctctcggtctccttcgagaagaccacgttcaacgcggtcccgcaccggttcgaggccggcacgccgaacatcgcgggcgcggtcgggctcgcggccgccatcgactggctctccacgatcgggctggaggcggcggcggcgcacgaggacgcgctcatcgcccacgcgctggacgcgctccgcgaggtccccgggatccgcctgatcggcacgccgcggcggcgggccggcgtcatctcgttcctccccggcgacgtccacccgcacgacgccggcaccatcctcgaccgccacggggtggcggtccgcgccgggcaccactgcgcccagccgctcatgcggcgcatgggcgtggcggccacggtgcgcgcctccttcgccgcgtacagcacgcgggccgacgtggacgcgctcgtccgcggcctgcacgcggtccgggaggtgttcgcgtga

SEQ ID NO: 784 - protein, 429 aa, SufSAnaeromyxobacter sp.
MSTAEAQAAGGRAARPEARDGARGAFDVERVRAEFPILARPVRGQPLAYLDSAATAQKPRAVIDAVRRYYEEDNANVHRGVHLLSERATRLYDGARVKVARFLGASDPHEVVFVRGTTEAVNLVAQTFGRQRVGPGDEILVTELEHHSNIVPWQLLCQEKGATLRAAPVSDAGDLDVEALDRMIGPRTRLVAVAHVSNALGTVNPVAEIVARAHAKGVPVLVDGAQAVPHLAVDLPALGADFYAFSGHKLYGPTGIGVLWGRKALLDALPPWQGGGDMILSVSFEKTTFNAVPHRFEAGTPNIAGAVGLAAAIDWLSTIGLEAAAAHEDALIAHALDALREVPGIRLIGTPRRRAGVISFLPGDVHPHDAGTILDRHGVAVRAGHHCAQPLMRRMGVAATVRASFAAYSTRADVDALVRGLHAVREVFA

SEQ ID NO: 785 - DNA, 1245 bp, Mycobacterium abscessus
gtgacggccactgtgccgctcgatatcaccgcgatcaggaatgatttcccgatcctgagtcggacggtgcgcggtggtaaaccgctggcgtatctggattccggggccacctcgcagcgcccggtgcaagtgctcgacgccgaacgccgtttcctcaccgagcgcaatgcggccgtgcaccgcggcgcacatcagctggcggaggaagcgacggacgcctacgagggcgcgcgcaatgcgattgcccggttcgtgggtgtcgacgacggcgagatcgtgttcaccaagaacgcgaccgaatcgctgaacctggtggcctacaccctcggtgacaacaggttcgatcgtgcggtgggaccgggcgatgagatcgtcgtcaccgaactcgagcatcacgcgaatctggttccgtggcaggaactctgccgccgcaccggcgccaccctgaggtggtttggcgtgactgacgatggccgtattgatgtcgactcgctggaactcaccgaagcggtcaaggttgtcgcattcacccatcagtcgaatgtgacgggtgccgtcgcgccagtggcagaactggtgcgacgtgcgaaggccgttggcgccctggtggttctcgatgcctgccagtccgtcccgcacatgtcggtgaacttccgggagctgggggtggactacgcggcgttctccggacacaagatgcttggcccctccggggtgggggtgttgtatggccggcgtgcgctgctggaggctatgcccccgttcatcaccggcggctccatgatcgagacggtgaccatggaggtcagcacctatgcaccgccgcctcaacgatttgaggcaggtgtgccgatgacctcccaggtggtgggcctgggcgcggccgtcgattatctcaatgcggtgggtatggaagccgttgccgcacacgaacatcagttggtgtccgcggcgctcgccgggcttgccggcatcgagggcgtccgcatcatcggccccacggacaacctcgatcgcggtggggcggtctccttcgtggtggacggtattcacgcgcacgacctaggacaggtgctcgacgacgagggcgtcgcggtgcgggtcggccatcattgtgcgtggccgctgcaccgtcgattcggcatagcggccagcgcccgcgcatctttcgcggtgtacaacaccctggacgaggtcgatcggctgaccgccggtgttcgccgcgcacaggagttcttttcataa

SEQ ID NO: 786 - protein, 414 aa, Mycobacterium abscessus
MTATVPLDITAIRNDFPILSRTVRGGKPLAYLDSGATSQRPVQVLDAERRFLTERNAAVHRGAHQLAEEATDAYEGARNAIARFVGVDDGEIVFTKNATESLNLVAYTLGDNRFDRAVGPGDEIVVTELEHHANLVPWQELCRRTGATLRWFGVTDDGRIDVDSLELTEAVKVVAFTHQSNVTGAVAPVAELVRRAKAVGALVVLDACQSVPHMSVNFRELGVDYAAFSGHKMLGPSGVGVLYGRRALLEAMPPFITGGSMIETVTMEVSTYAPPPQRFEAGVPMTSQVVGLGAAVDYLNAVGMEAVAAHEHQLVSAALAGLAGIEGVRIIGPTDNLDRGGAVSFVVDGIHAHDLGQVLDDEGVAVRVGHHCAWPLHRRFGIAASARASFAVYNTLDEVDRLTAGVRRAQEFFS

SEQ ID NO: 787 - DNA, 1218 bp, Lentisphaera araneosa
atgctagatatcgctaaaattcgtgcggattttcccattttagaaaagcaggttcataaaaagactttagcttacctcgataatggtgcgacgacacttaagccaaatcaggtggtgagtgcagttgaaaagcattataaagaggaatgctcgaatattcaccgtgggattcactggttgagtgagagagcgacggaatcctatgaagcgactcgcggtaaagttaaagaattaatcaatgcagatagcacggataacattgtttttacaagtggtacgacggctggagttaatctagttgttcaaagttatggtcgtaataaactgaatgctggcgatgaagtgattatcagtgccatggaacatcatgcgaatatagttccttggcagatgttacgcgatgaaaagggtatagtgattaaagttgttcccgttttcgaagatggttctttggatatggaggcttattactcccttatcagcgataaaacaaaattcatttcaatcatgtacgtatccaacgtactgggtacgattaatccgatgcaggaaatttgtgataaggccaatgaattaggtattcctgttttagtggatgccgctcaagcgattgctcacatgcctgtagatgtgcaagaactcaactgtacctttatggtgttttcagctcacaaaatgtatggcccaactggcgtaggtgtgctctacggtaaaactgagtatttagaagcgatgcctcccgtaactggcggtggcgatatgattctttcggtaagttttgacaagacagtttacaacgtggctccttataaatttgaagcgggaacgcctaatattgccggtgttattgctttgggtgctgccattgattacattcagagtttcgactggaaagaagttgaagagcgtgaagaagaactcattgagtacgcacatgaacaacttcaagaaattccaggcttaaaaattattggtacggccaagaataaatctggtgcggtttcttttacgatgaaagatattcatccccacgatattggtacgattgttgaccgttctggtgtggcgattcgcacggggcatcactgtgcacaaccactgatggaatcttttggcattgtagctacggcacgtgcttcttttgcgatctataataccaaagaagaagttgatcaattggtaaaagctctcaagaaagttcaggagatctttgcgtga

SEQ ID NO: 788 - protein, 405 aa, Lentisphaera araneosa
MLDIAKIRADFPILEKQVHKKTLAYLDNGATTLKPNQVVSAVEKHYKEECSNIHRGIHWLSERATESYEATRGKVKELINADSTDNIVFTSGTTAGVNLVVQSYGRNKLNAGDEVIISAMEHHANIVPWQMLRDEKGIVIKVVPVFEDGSLDMEAYYSLISDKTKFISIMYVSNVLGTINPMQEICDKANELGIPVLVDAAQAIAHMPVDVQELNCTFMVFSAHKMYGPTGVGVLYGKTEYLEAMPPVTGGGDMILSVSFDKTVYNVAPYKFEAGTPNIAGVIALGAAIDYIQSFDWKEVEEREEELIEYAHEQLQEIPGLKIIGTAKNKSGAVSFTMKDIHPHDIGTIVDRSGVAIRTGHHCAQPLMESFGIVATARASFAIYNTKEEVDQLVKALKKVQEIFA

SEQ ID NO: 789 - DNA, 1209 bp, Saccharopolyspora erythraea
gtgcgggacaaccgtccgctcgtctacctggactcgggcgcgacctcgcagcgtccccgccaggtgctcgacgcggagcgctcctacgtggagacctccaacgccgcggtgcaccgcggcgcgcaccagctcgccgaggaggccacggacgcctacgagggcgcgcgcgccaagatcgcccgcttcatcggcgccggcgtcgacgaggtggtgttcgtcaagaacgccaccgagggcgtcaacctggtcgcctacgccatgagcaacgccgccacgtccggggcggaggccgagcgcttccgcctcgggccgggcgacgaggtcgtggtgaccgagatggagcaccacgccaacctggtgccgtggcaggagctgtgccgccgcaccggcgccacgctgcgctggttcggcgtcaccccggagggcaggctcgacctgtccgacgtcgacggggtgatcaccgagcgggccaaggtggtggccttcgcccaccagtccaacgtgctgggcacggtcaacccggtcgagccgctggtggcgcgggccaagcaggtcggcgcgctcaccgtgctcgacgcctgccagtcggtgccgcacaagccggtcgacttcggcgcgctggacgtggacttcgcggtgttctccgggcacaagatgctcggcccctccggcgtcggcgtgctctacggccgcaaggagctgctggcggcgatgccgccgttcatcaccggcggctcgatgatcgagatggtgcacatcgaccgcgccacctacgccgaaccgccccagcgcttcgaggccggggtgccgatgacgtcccaggtcatcggactgggcacggccgtggactacctgtcggtggtcggcatggaacgcatcgccgagcacgagcgccggctcaccgaaccggcgctgcgggagctctcggcggtcgagggcgtgcggatcatcggcccgctgagcaccgaggaccgcggcggtacggtgtccttcgtggtcgagggcgtgcacccgcacgacgtcggccaggtgctggacgaccggggtgtcgaggtccgcgtcggccaccactgcgcgtggccgctgcaccgcgctatgggggtcccggccaccgtccgggccagcttctacctctacaacgagctcgacgaggtgaaggcgctggtggacgcggtgcgcgaggcgcagcggttcttcggcgtggcgtga

SEQ ID NO: 790 - protein, 402 aa, Saccharopolyspora erythraea
MRDNRPLVYLDSGATSQRPRQVLDAERSYVETSNAAVHRGAHQLAEEATDAYEGARAKIARFIGAGVDEVVFVKNATEGVNLVAYAMSNAATSGAEAERFRLGPGDEVVVTEMEHHANLVPWQELCRRTGATLRWFGVTPEGRLDLSDVDGVITERAKVVAFAHQSNVLGTVNPVEPLVARAKQVGALTVLDACQSVPHKPVDFGALDVDFAVFSGHKMLGPSGVGVLYGRKELLAAMPPFITGGSMIEMVHIDRATYAEPPQRFEAGVPMTSQVIGLGTAVDYLSVVGMERIAEHERRLTEPALRELSAVEGVRIIGPLSTEDRGGTVSFVVEGVHPHDVGQVLDDRGVEVRVGHHCAWPLHRAMGVPATVRASFYLYNELDEVKALVDAVREAQRFFGVA

SEQ ID NO: 791 - DNA, 1245 bp, Acidiphilium cryptum
atgagcgcggccatcgagcagcccggcttcgacatcgcgcgcatccgcgccgatttccccatcctgtcgcagacggtgcatggcaagaaactggtgtttctcgatagcggcgcctcggcgcagaagccgcgcgcggtgatcgatgcgatggtccgctcgatggagacacgctacgccaatgtccatcgcgggctgcactggctgagcgagcgcgcctcggacgactacgaggccgcgcgcgacaaggcggcggctttccttaacgcggcgcgggaggagatcgtcttcgtgcgcaacgcgaccgaggggatcaacctcgtcgccgcgaccttcggccggtcggcgctgcgtccgggcgatgcggtggtggtgagcgagatggagcaccacgccaatctcgtgccctggcagatgctgcgggattcgcacgggatcgagctgcgcatcgcgaagatcaccgatgccggcgagctcgacttcgccgatctggagcggcaattcgccgatgggcgggtgcggctgctggcgatcacccatatgtcgaacgtgctcggcacctacacgccggtggagcggcttgccgcctttgcgcacgagcgcggggcgcggctgctgctcgatggcgcgcaggcggtggtgcaccgggcggtggacgtccgtgcgatcgatgcggatttctacgtgttctccggccacaagctctacgggccgtccggcatcggggtgctgttcggcaagcgcgagctgctcgacgcgatgccgcccttcctcggcggcggcgacatgatccgcagcgtgagctacgaaaaatcgacctgggcggagccgccctaccggttcgaggcgggaacgccggcgatcgtcgaggcggtgggtctcgcggcagcgatcgattatgtgaacgcgatcgggtttccggcgatcgcgtcgcatgagcgggcgctgaccgatcacgcgctggcgacgctcgatgcgatcggcggcgtccatgtggtcgggcgggcgcaggaccgcggcggggtcgtcgccttcaccatggacggggtgcatgcgcacgacgtcgccaccctgctcgacaagcaggggatcgcggtgcgggccgggcatcattgcgccgaaccgctgacccgccggctcgggctcgacagcaccgcccgcgcgacgttcggcgtctatacgacgatggaggagatcgacgcgctggcggcggggctgcggcgcgtgcagcaggtgttcggcggatga

SEQ ID NO: 792 - protein, 414 aa, Acidiphilium cryptum
MSAAIEQPGFDIARIRADFPILSQTVHGKKLVFLDSGASAQKPRAVIDAMVRSMETRYANVHRGLHWLSERASDDYEAARDKAAAFLNAAREEIVFVRNATEGINLVAATFGRSALRPGDAVVVSEMEHHANLVPWQMLRDSHGIELRIAKITDAGELDFADLERQFADGRVRLLAITHMSNVLGTYTPVERLAAFAHERGARLLLDGAQAVVHRAVDVRAIDADFYVFSGHKLYGPSGIGVLFGKRELLDAMPPFLGGGDMIRSVSYEKSTWAEPPYRFEAGTPAIVEAVGLAAAIDYVNAIGFPAIASHERALTDHALATLDAIGGVHVVGRAQDRGGVVAFTMDGVHAHDVATLLDKQGIAVRAGHHCAEPLTRRLGLDSTARATFGVYTTMEEIDALAAGLRRVQQVFGG

SEQ ID NO: 793 - DNA, 1263 bp, Nocardia farcinica
atgaccgctgcgcctgtcacgggccggacactcgacgtcgcccggatccgggccgacttcccgatcctgagccgcacggtccgggacggtaagccgttggtgtacctggactccggcgccacctcgcagcgaccgctggccgtgctcgacgccgaacgcgaattcctcaccgagcgcaactccgcggtgcatcgcggggcgcatcagctggccgaggaggcgaccgacgcctacgagggcgcccgcgccgacatcgcccgcttcgtcggggtcgatgccggggagatcgtgttcaccaagaacgcgaccgagtcgctgaacctggtgacctactccttcgccgacaaccggttcccctaccacgtgggaccgggcgacgagatcgtggtcaccgaactcgagcaccacgcgaacctggtgccgtggcaggagctcgcgcggcgtaccggcgccaccctgaagtggtacggcatcaccgacgacggccgcatcgacctggactcgctggagctctcgcccgccaccaaggtcgtcgcgttcacccaccagtccaacgtgaccggcgcggtgtcgccggtcgaggaactggtgcggcgcgcgacggcggtgggcgcgctcaccgtgctcgacgcctgccagtcggtgccgcacatgccggtggacttccgggcgctcggcgtggacttcgccgccttctccggacacaagatgctcggcccctccggtgtcggcgtgctctacggccgccgcgcgctgctcgaggagaccccgccgttcatcaccggcggctcgatgatcgagaccgtgacgatggagggcagcaccttcgccccgccgccgcagcggttcgaggccggcgtgccgatgacctcgcaggtcgtcggcctcggcgcggccgtgcggtatctcgagggcatcggcatggccgcggtcgccgagcacgagcacgcgctcaccggtgccgcgctcgcgggtctgggcgccatcgacggcgtgcggatcgtcggccccaccgagaacgtggaccgtggcggcgcggtgtcgttcgtggtggacggcatccacgcccacgacgtcggccagatcctcgacgacgagggcgtggccatccgggtcgggcaccactgcgcctggccgctgatgcgccgcctcggcgtgcccgccaccgcccgtgcctccttcgcggtctacaacaccctcgacgaggtcgagcagttggtggccgcggtgcggaaggctcagcgcttcttcggggttgcatag

SEQ ID NO: 794 - protein, 420 aa, Nocardia farcinica
MTAAPVTGRTLDVARIRADFPILSRTVRDGKPLVYLDSGATSQRPLAVLDAEREFLTERNSAVHRGAHQLAEEATDAYEGARADIARFVGVDAGEIVFTKNATESLNLVTYSFADNRFPYHVGPGDEIVVTELEHHANLVPWQELARRTGATLKWYGITDDGRIDLDSLELSPATKVVAFTHQSNVTGAVSPVEELVRRATAVGALTVLDACQSVPHMPVDFRALGVDFAAFSGHKMLGPSGVGVLYGRRALLEETPPFITGGSMIETVTMEGSTFAPPPQRFEAGVPMTSQVVGLGAAVRYLEGIGMAAVAEHEHALTGAALAGLGAIDGVRIVGPTENVDRGGAVSFVVDGIHAHDVGQILDDEGVAIRVGHHCAWPLMRRLGVPATARASFAVYNTLDEVEQLVAAVRKAQRFFGVA

SEQ ID NO: 795 - DNA, 1287 bp, Nocardioides sp.
atgacgacgacccagctggccggcctgctccccgagctggaggtgatccgcgcggacttcccgatcctggatcggaccctcgcgggtggtctgccgctggtctacctcgacagcgccaacacctcgcagaagccgcaggtcgtgatcgacaccatggtcgaccacctcgaacggcacaacgcgaacgtcgcccgggccatgcaccagctcggcgcggagtcgtcggaggcgttcgaggcggcgcgggacaaggtcgcggcgttcatcaacgcgccgagccgggacgaggtgatcttcaccaagaacgcctccgaggcgctcaacctggtggccaacaccctgtcctgggcgcggggcgaccgggtgaacggagtcggggctctcggcgcgggcgacgaggtcgtcatcaccgagatggagcaccactccaacatcgtgccgtggcagctgctgaccgagcgcacgggcgcgaccctgcgctggttcggtctcaccgacgacggccggctcgacctctcgaacatcgactcgctgatcaccgagcggaccaaggtggtcgccctcacctgggtctcgaacatgctcggcacgatcaacccggtcgccgagatcgctcggcgggcccacgaggtcggcgcgctcgtggtggtcgacgcctcccaggccgctcctcagctgcccgtggacgtggtcgcgtcgggtgccgacctgctggcgttcaccggccacaaggtcgtcgggccgaccggcatcggcgtgctctggggccgccgcgaggtgctcgaccagctaccgcccttcctcggtggcggcgagatgatcgagacggtgcggatggagcgctcgacgtacgccccgatcccgcacaagttcgaggccggtacgccgcccatcgtcgaggccgtgggcctcggcgcagcggtcgactacctctcgatgatcggcctggacgcgatccaccggcacgagcaggcgatcacggcgtacgcgctcgacgggctcgccaccgtgcccggcctgcgagtcctcggtccgctctccgcgaaggaccgcggcggagcgatcgccttcgagatcgacggggtgcacccgcacgacgtcgcgcaggtgctcgactcgcgcggggtcgcggtccgggccggccaccactgcgcgaagcccgcgcacgcccgcttcggcgtgcagagctccacccggatgtcgtcgtacctctacacgacgccggcggagatcgacgcgctcgtcgaggccctggaatacacccgctcgtacttcaagttgggttga

SEQ ID NO: 796 - protein, 428 aa, Nocardioides sp.
MTTTQLAGLLPELEVIRADFPILDRTLAGGLPLVYLDSANTSQKPQVVIDTMVDHLERHNANVARAMHQLGAESSEAFEAARDKVAAFINAPSRDEVIFTKNASEALNLVANTLSWARGDRVNGVGALGAGDEVVITEMEHHSNIVPWQLLTERTGATLRWFGLTDDGRLDLSNIDSLITERTKVVALTWVSNMLGTINPVAEIARRAHEVGALVVVDASQAAPQLPVDVVASGADLLAFTGHKVVGPTGIGVLWGRREVLDQLPPFLGGGEMIETVRMERSTYAPIPHKFEAGTPPIVEAVGLGAAVDYLSMIGLDAIHRHEQAITAYALDGLATVPGLRVLGPLSAKDRGGAIAFEIDGVHPHDVAQVLDSRGVAVRAGHHCAKPAHARFGVQSSTRMSSYLYTTPAEIDALVEALEYTRSYFKLG

SEQ ID NO: 797 - DNA, 1248 bp, Corynebacterium urealyticum
atggttgatactcacctcaacaccgaagcgatccgacaggatttcccgatcctctcccgcaccgttcgggacggccagcccctgatctacctcgattccggggcgaccgcccagcggcccctgcaggtgttggacgcggagcgcgactttctgaccaagcacaacgccccggttcaccgcggtgcctaccagctcgcggaggaagccacggatgcctatgagagcgcccgggaggccatcgcggcgttcgttggtgcggaagatgaggagatcgccttcacgaagaacgccaccgaggcgctcaacgaggtggccttcgtcctgggggactcccgtgccggtgagctgcaggtcgaggagggcgacgagatcgtcgtctctgagctcgagcaccacgccaacctcgtgccctggcaggaactggcgcgccgcactggtgcgaccctgaagtggtaccaaaccaccgaggatggccgcatcgacctggatagcttgcagctgagcgagaagacgaaggtcgtggcgctcacacaccagtcaaacgtcaccggcgccgttctggacgtcaaggaggccgtgcggcgggcccgggaggtcggcgcgctcttcgtgctggatgcctgccagtccgtgccacacatggcggtggacttccatgaactggatgtggatttcgcggccttctccgggcacaagatgcttgggcccaacggcgtgggcgtgatgtacggcaagaaggagcacctgcgcgtccttccaccgttcctcaccggcgggtcgatgatccagaaggtgacgatggagggctccaccttcgccgacgctccgcagaagttcgaagcgggcacccagatgacctcccaggtcgtgggtcttggtgccgcggtggcatacctcaacgagctcggcatggataaggtcgccgcccacgagcatgagctcacggcctatgcgctggagcagctcagcgacatcccgggactgcggatcatcggtccgacggatatgcacaaccggggtagcgcggtgagcatggtggtcgacggcatccacccgcacgacctggggcagatcctggacgaccagggtgtatccatccgggtggggcaccactgcgcgtggccggcccacacctgcctcggtgtgcaggccacggcgcgcgccagcttctacgtctataacgagaagtgggaggtcgaccggctcgtcgagggcatccgcaaggcgcaggagttcttcggcgtctag

SEQ ID NO: 798 - protein, 415 aa, Corynebacterium urealyticum
MVDTHLNTEAIRQDFPILSRTVRDGQPLIYLDSGATAQRPLQVLDAERDFLTKHNAPVHRGAYQLAEEATDAYESAREAIAAFVGAEDEEIAFTKNATEALNEVAFVLGDSRAGELQVEEGDEIVVSELEHHANLVPWQELARRTGATLKWYQTTEDGRIDLDSLQLSEKTKVVALTHQSNVTGAVLDVKEAVRRAREVGALFVLDACQSVPHMAVDFHELDVDFAAFSGHKMLGPNGVGVMYGKKEHLRVLPPFLTGGSMIQKVTMEGSTFADAPQKFEAGTQMTSQVVGLGAAVAYLNELGMDKVAAHEHELTAYALEQLSDIPGLRIIGPTDMHNRGSAVSMVVDGIHPHDLGQILDDQGVSIRVGHHCAWPAHTCLGVQATARASFYVYNEKWEVDRLVEGIRKAQEFFGV

SEQ ID NO: 799 - DNA, 1245 bp, Legionella pneumophila
atgagtactaatccttccctaatgacatcctttgatgtcaataaaatcaggaaagattttcctgtattgcatcagaaaatcaatgagtatgatttggtgtattttgataacgcggctactactcaaaaacccaaggctgtgattgatgctattgctcaattttatgaaaaggataattcaaacgtacatcgtggagttcatgccttgagtgtcagggctacggaaatgtatgaggcagccagagcaaaggtaaaacgatttattaatgccaggtcaccgagagaatgtatttttgtacgtggtaccactgaagccattaatttagtggctcagagtctcgtagcccctcgcatattacctgatgaagaaattttgataacgcatatggaacatcattccaatatagttccctggcaaatggtctgcaagaaaatgggttgcaagctgcaagttgcccctatttctttaaatggcgaggtaatacttgaagagtttgaaagaaagttaaatgaaaacactaaaatggttgcgattaattacgcctccaattctttaggaaccattaatcctgttaaaacaatgattaagatggcccatgaagtaggggctaaagtgttactggatggggcacaggcaacggctcacctgattgtggacgttcaggatttggattgcgatttctatgctttttccggacataaaatgtatggtcccactggaataggtgttttatggggaaaagaagaattattaaatagcatgactccttatcaaggcgggggcgaaatgatcaactccgtgagttttgaagcaacggaatatgcggctatcccccataaatttgaagcaggcaccccgaatattgcaggggcgattggtttggctgctgcaattgattatatttggtcattggatttggatgcgatagctgaatatgaaacacaattgttaaactatgctaccaaggctattgaagcagtaaaagggtacaatattattggaacggctgccaacaaagtacccattatctcttttgtccacggaaaaattcatgcccatgacattggaactattctggatagtgaaggtatagcgatacgcagcggacatcactgcactatgcctttgatggatttctacgatgttgctgcgacctctcgtatttccatgtccttttataatacgtttaaagaaattgattattgtatggaagccttacaacgagttaaagaggtattcgcatga

SEQ ID NO: 800 - protein, 414 aa, Legionella pneumophila
MSTNPSLMTSFDVNKIRKDFPVLHQKINEYDLVYFDNAATTQKPKAVIDAIAQFYEKDNSNVHRGVHALSVRATEMYEAARAKVKRFINARSPRECIFVRGTTEAINLVAQSLVAPRILPDEEILITHMEHHSNIVPWQMVCKKMGCKLQVAPISLNGEVILEEFERKLNENTKMVAINYASNSLGTINPVKTMIKMAHEVGAKVLLDGAQATAHLIVDVQDLDCDFYAFSGHKMYGPTGIGVLWGKEELLNSMTPYQGGGEMINSVSFEATEYAAIPHKFEAGTPNIAGAIGLAAAIDYIWSLDLDAIAEYETQLLNYATKAIEAVKGYNIIGTAANKVPIISFVHGKIHAHDIGTILDSEGIAIRSGHHCTMPLMDFYDVAATSRISMSFYNTFKEIDYCMEALQRVKEVFA

SEQ ID NO: 801 - DNA, 1254 bp, Mycobacterium marinum
atgactgtctcggtggcgcgtctggacctcgcggcgatccgggccgacttcccgatcctgcagcgcgtcatgcgtagcggaaatcagttggcctacctggattccggtgccacatcgcagcgcccgctgcaggtgctcgatgccgagcgggaatttctcaccacgtgcaacggcgcggtgcatcgcggtgcccaccagctgatggaagaggccaccgacgcctacgagcagggccgagccgacatcgcggccttcgtcggtgccgagcccgacgaactggtgttcaccaagaacgccaccgagtcactcaatctggtgtcatacgtgctgggggacagccggttcgaccgagccatcggcccgggcgacgtcatcgtcaccaccgaactcgaacaccacgccaacctgattccgtggcaggaactcgcccggcgcaccggggcaacgttgcgttggtactcggtgaccgacgaggggcgtatcgacctcgattcactgcagctcgatgagcgcgtcaaagttgttaccttcactcatcattcgaatgtgaccggtgcgttggcgccggtggccgaattggtgtctcgcgccaaggcggtgggggcgctgacggttttggatgcctgccagtcggtgccgcatcagccggtcgactttcacaaacttgatgtggatttcgccgccttctcgggacacaaaatgctgggtcccaacggaatcggtgtgctctatggccgtcgtgagctgttggcggcgatgccgccgttcctcaccggcggttcgatgatcgaaacggtgaccatggaggccagcacgtacgcgcccgcgccccagcgcttcgaggcgggcaccccgatgacctcccaggtggtcggattggcggcagcgtcgcgctatctggacgccatcggtatggatgtcatcgaagcccacgagcgtgacctggttgccgcggccatcgaggggctctcggccatcgagggcgtccgtatcatcggacccacgtcgatggagaaccgcgggtcgccggtgtcgttcgtcgttgatggggtgcacgcccacgatgtcggtcaggtgctcgatgacgaaggcgtcgcggtccgggtcgggcatcactgcgcattgccgctgcaccgcaagttcggcgtagccgcaaccgcgcgcgcgtcgttcgcggtgtacaacacccgcgacgaggtgaaccggctgttggccggtgtgcagcggtcgctgaatttctttgggagaggctga

SEQ ID NO: 802 - protein, 417 aa, Mycobacterium marinum
MTVSVARLDLAAIRADFPILQRVMRSGNQLAYLDSGATSQRPLQVLDAEREFLTTCNGAVHRGAHQLMEEATDAYEQGRADIAAFVGAEPDELVFTKNATESLNLVSYVLGDSRFDRAIGPGDVIVTTELEHHANLIPWQELARRTGATLRWYSVTDEGRIDLDSLQLDERVKVVTFTHHSNVTGALAPVAELVSRAKAVGALTVLDACQSVPHQPVDFHKLDVDFAAFSGHKMLGPNGIGVLYGRRELLAAMPPFLTGGSMIETVTMEASTYAPAPQRFEAGTPMTSQVVGLAAASRYLDAIGMDVIEAHERDLVAAAIEGLSAIEGVRIIGPTSMENRGSPVSFVVDGVHAHDVGQVLDDEGVAVRVGHHCALPLHRKFGVAATARASFAVYNTRDEVNRLLAGVQRSLNFFGRG

SEQ ID NO: 803 - DNA, 1278 bp, Psychromonas ingrahamii
atgtccttagtcgaccgaccagcagagcatggcagtttgccattaaacaaggttgattggccggcaattcggcgtgattttcctctgttagcacaaaaaccgtataataaacccttagcttatctcgataatgccgcaacgacgcaaaaacccaatagtgtgattgatagtatcgcgcacttttatcgttttgataatgccaatgttcatcgtggtatttatcaattaagtgagcgggctactgccacttttgaggcagcaagggataaaatacagtgttttttaaatgccaggttgcgagaggaaattattttcgtccgcggtgcgactgaggctattaatctggtcgcacagagttatgcccggccccgcttcaaatcaggagatgagatcttgatcagtgcgatagagcatcattccaatatagttccctggcaaatggtctgcaaacaaaccggcgcacagctaaaggttataccaatcaatgataacggggagattatgctggatagttatcaggcattattaagtgaaaaaactaaaatagtggcaatcacccatctctccaatgctttggggagtattgcaccggtgcagcgaatgataaccatggcgcatgctagaggaataccggtattacttgatggtgctcaagcagcccctcatctcaggatcaatctgcaggctttagattgtgaattctacaccttttccagtcacaaaatttacggccctaccggagtcggcgtgttatatggcaaaaaaagctaccttgatgcaatggagccctatcagggaggtggggaaatgatcagtcgagtcagttttgagagcagtgactataacggcttaccttacaaatttgaggcaggtacacctaatattgcgggtgtggtaggtctggctgctgccctcgattacatcaacacgataggtcttgacaatatttgccaacgcgaacaacagttattagattatgccaccaaagcattagagcaaacagccgggttacgtattattggccaagcaaaacacaaggccagtattatctcttttgtgcttgatagcgcgcatcctcatgatataagtacaattcttgatcagcagggagtcgcaattcgagcaggtcatcactgtgcgatgccggtgatgacccgttttaatgtcccggcaaccgcacgcgcttccttttctttctacaataatgaaagtgatatagaacaattagtgcaaagtttgcggctggtaaacaaaatttttaccataaaaaatgggtga

SEQ ID NO: 804 - protein, 425 aa, Psychromonas ingrahamii
MSLVDRPAEHGSLPLNKVDWPAIRRDFPLLAQKPYNKPLAYLDNAATTQKPNSVIDSIAHFYRFDNANVHRGIYQLSERATATFEAARDKIQCFLNARLREEIIFVRGATEAINLVAQSYARPRFKSGDEILISAIEHHSNIVPWQMVCKQTGAQLKVIPINDNGEIMLDSYQALLSEKTKIVAITHLSNALGSIAPVQRMITMAHARGIPVLLDGAQAAPHLRINLQALDCEFYTFSSHKIYGPTGVGVLYGKKSYLDAMEPYQGGGEMISRVSFESSDYNGLPYKFEAGTPNIAGVVGLAAALDYINTIGLDNICQREQQLLDYATKALEQTAGLRIIGQAKHKASIISFVLDSAHPHDISTILDQQGVAIRAGHHCAMPVMTRFNVPATARASFSFYNNESDIEQLVQSLRLVNKIFTIKNG

SEQ ID NO: 805 - DNA, 1269 bp, Corynebacterium efficiens
atgtccgatttcctcaaagacgacggaaccctcaacgtcgcgcggatcagggaggaattcccgatcctcaaccgcacggtgaggaacggccagccactgacctacctggactcaggtgcgacatcccagcgccccgagcgggtgtggcgtgcggaggagcggtttgttctgcacaccaacgccccggttcaccgtggcgcctaccagctcgctgaggaagccacggatgcctacgagggtgcgcgtgagaagatcgcggccttcgtcggcgcagaccaggatgagatcgccttcaccaagaatgcgaccgaggccctgaatctggtggcctacaccctgggtgatgaccgcgcgggcgcgcaccgggtccaggccggtgacaccgtggtggtgacggagctggaacaccatgccaacctggtgccatggcaggaactctgccgcaggaccggggcgacactgaagtggtacaagatcacccccgatggtcgcatcgacctcgattccctcgaactcgatgagaccgtcaaggttgtgaccttcacccaccagtcgaacgtgaccggtgcggtgtcggatgtgccggagatggtgcgccgtgcgcgggcagtgggtgccctggtggtgctcgatgcctgccagtcggttccccatatgccggttgatttccacgcgctcgatgtggacttcgccgcgttctccggccacaagatgctgggaccgtccggcgtgggtgccgtgtacggcaagcgtgagcttctcgacgcattaccccccttcctcacgggaggttccatgatcgaggtcgtgaacatggacggctccacctacgcacccgcaccgcagcgtttcgaggcgggaacccagatgaccagccaggtcgtcgggctcggtgccgcggtggagatgctcaccgagatcggcatggaggccatcgccgcccatgagcatgagctcaccgcctacgccctggagaaactgcaggggattcccggtgtgcagatcgtgggtccggccaccgcggagaaccgtggcggcgccctgagcttcgccgtggatggtatccacccgcatgacctgggtcaggttctcgatgatcagggcgtgtccatccgcgtgggccaccactgcgcatggccactgcaccgctgcatgaacgtacaatcgacggcacgggcatcgttctacctctacaacaccatggaggagatcgaccgccttgtcgacgccatcgagaaggcgaagcagttctttggagtagaagtatga

SEQ ID NO: 806 - protein, 422 aa, Corynebacterium efficiens
MSDFLKDDGTLNVARIREEFPILNRTVRNGQPLTYLDSGATSQRPERVWRAEERFVLHTNAPVHRGAYQLAEEATDAYEGAREKIAAFVGADQDEIAFTKNATEALNLVAYTLGDDRAGAHRVQAGDTVVVTELEHHANLVPWQELCRRTGATLKWYKITPDGRIDLDSLELDETVKVVTFTHQSNVTGAVSDVPEMVRRARAVGALVVLDACQSVPHMPVDFHALDVDFAAFSGHKMLGPSGVGAVYGKRELLDALPPFLTGGSMIEVVNMDGSTYAPAPQRFEAGTQMTSQVVGLGAAVEMLTEIGMEAIAAHEHELTAYALEKLQGIPGVQIVGPATAENRGGALSFAVDGIHPHDLGQVLDDQGVSIRVGHHCAWPLHRCMNVQSTARASFYLYNTMEEIDRLVDAIEKAKQFFGVEV

SEQ ID NO: 807 - DNA, 1254 bp, Corynebacterium jeikeium
gtgagttcaaccagttccctggacaccgcgaagatccgcagcgacttcccgattctctcgcgcaccgtgcgcgacgggaagaagctggtgtatctggattccggagctaccgcccagcggccaatgcaggtgttggatgcggagcgggagttcctgaccacccataacgctccggtgcaccgcggtgcctacgagatcgcggaggaggccaccgagtcctacgagtccgcccgtgaggccatcgccgccttcgtcggcgccgaggaccgggagatcgccttcgccaagaacgccaccgaagcgctcaacgaggtcgcctacattctgggcgacgcccgggcgggggagctgcaggtcacagaaggcgacgagatcgtagtctccgagctggagcaccacgccaacctggtgccgtggcaggagctcgcccaacgcaccggtgcgaccctgaagtggtactccgctactccggatggccgcatcgacctggagagcctggagctcagcgagcgcactaaggtcgttgcgctgacgcaccagtcgaacgtcaccggcgccgtgctggacgtcaaggaggccgtacgccgcgcccgcgcagtcggggcgatcttcgtcctggacgcctgccaatccgtgccgcacatgcccgtggacttccacgagctggacgtggacttcgccgcgttctccggccacaagatgttgggacctaacggcgtcggcgtcctttatggcaagacccagcacctcgaccagctacctcctttcctgaccggcggttcgatggtggagaaggtcactatggagcgcacgacattcactgaagctccacagcgtttcgaggccggaacgcaaatgacttcccaggtcgtgggtctgggcgctgccgtgaagtacctgagcgagctgggtatggacaaggtttccgcccacgaagcggagctgacggcctacgccctggaacagctgcagaccatcgaaggcttgcgcatcatcggccccaccgacacgcagaaccgcggtagcgccctgagcttcgtcgtggagggaatccaccctcacgacctcggccaggtcgtcgacgatcagggtgtgtgcatccgtgtgggccaccactgtgcatggccggtacacacgtgcatgggcgtgcaggccaccgcccgcgccagtttctacatctacaatgacttttcggaagtcgacgcgctggtcgctgccatccgcaaggcgcaagagttcttcggcgcggcgtag

SEQ ID NO: 808 - protein, 417 aa, Corynebacterium jeikeium
MSSTSSLDTAKIRSDFPILSRTVRDGKKLVYLDSGATAQRPMQVLDAEREFLTTHNAPVHRGAYEIAEEATESYESAREAIAAFVGAEDREIAFAKNATEALNEVAYILGDARAGELQVTEGDEIVVSELEHHANLVPWQELAQRTGATLKWYSATPDGRIDLESLELSERTKVVALTHQSNVTGAVLDVKEAVRRARAVGAIFVLDACQSVPHMPVDFHELDVDFAAFSGHKMLGPNGVGVLYGKTQHLDQLPPFLTGGSMVEKVTMERTTFTEAPQRFEAGTQMTSQVVGLGAAVKYLSELGMDKVSAHEAELTAYALEQLQTIEGLRIIGPTDTQNRGSALSFVVEGIHPHDLGQVVDDQGVCIRVGHHCAWPVHTCMGVQATARASFYIYNDFSEVDALVAAIRKAQEFFGAA

SEQ ID NO: 809 - DNA, 1242 bp, Leptospira borgpetersenii
atgaatttctcagccgaaagaattagaaccgatttcccgattttgggaacaatgatgaacggaaaaccgctcgtttttttggacagtgcggctagttcgcaaaaaccctttacggtcatcgatagaatcgaaaagtattatagagaagaaaacgcaaatatacatcgtgggatttattatctttctcaaaaagccacggaaaaatacgagctgagtagaattcgtctttcccgatttatcggagcccagtgtgcgaaggtttgtatctttacgagaaacgcgaccgaatcgatcaatttagtcgctcagacttggggaaggactcaagtcgaagaaggggatgagatcgttttgaacgaactcgaacaccattccaacatcgtaccttggcagatgctcgctcaggaaaaaaaagcggtattaagattcattccgttaaacgaagacggcacgttggatctgagcaatttggatgagatcatcacgactaagacaaagttagtcgctgttgctcagatgtcgaacgtgaccggaacgattcacgatcttgcttcgattcaaaaaagagcgaaagaagtaggggctaaggttcttgtggacggggctcagggggtttgtcatctccctgtcaatatgaaggaaatggattatgatttctacgtattctccgcgcataagatgctcggcccgaccggagtcggagttctttacgcaaaagaagaaattttagaggagatgcctccttggatgggcggaggggatatgatcgctcacgtttataaggaaagatccacgtatgcggaacttccttccaaactcgaggcgggaactcccaacattgcgggagtgatcggtttcgaatctgcgatcgaatatctcgaaacgatcggaatgcaggaagtcagaaatcacgaagtggaacttctcgcttatgcactcgatcgattggacgatttcggcggattggaactttatggaacgagggatttatccaaaagaggaggagtcatttccttcaactttccgggagtgcatccgcacgatgtcggaacgattctcgacgaagagggaattgcgatccgggtcggacatcactgtgctcaaccttttatggcgtttaagaacataccggggacctgccgcgcgagcctctatctttacaatacaaaaggtgacatcgatcgattgatcgagggtctaattaaggtaaaggaaatattctcccgtgtccttaagcgatag

SEQ ID NO: 810 - protein, 413 aa, Leptospira borgpetersenii
MNFSAERIRTDFPILGTMMNGKPLVFLDSAASSQKPFTVIDRIEKYYREENANIHRGIYYLSQKATEKYELSRIRLSRFIGAQCAKVCIFTRNATESINLVAQTWGRTQVEEGDEIVLNELEHHSNIVPWQMLAQEKKAVLRFIPLNEDGTLDLSNLDEIITTKTKLVAVAQMSNVTGTIHDLASIQKRAKEVGAKVLVDGAQGVCHLPVNMKEMDYDFYVFSAHKMLGPTGVGVLYAKEEILEEMPPWMGGGDMIAHVYKERSTYAELPSKLEAGTPNIAGVIGFESAIEYLETIGMQEVRNHEVELLAYALDRLDDFGGLELYGTRDLSKRGGVISFNFPGVHPHDVGTILDEEGIAIRVGHHCAQPFMAFKNIPGTCRASLYLYNTKGDIDRLIEGLIKVKEIFSRVLKR

SEQ ID NO: 811 - DNA, 1248 bp, Mycobacterium vanbaalenii
gtgacggcctcggtcgatcttgacgtcgccgccatccgcgcggactttccgatcctcaagcgggtgatgcgcggtggcaatacgttggcctacctggattccggggccacctcgcagaagccgctgcaggtgctcgatgccgagcgtcagttcctgacgacctcctacggcgcggtccaccgcggcgctcatcagctgatggaggagtccaccgacgcctatgagcagggtcgtgccgatatcgccgcgttcgtcggtgcagcgcccggcgagctggtgttcaccaagaatgcgaccgaggcgttgaacctggtgtcgtacgtgctcggcgacgaccgctccgggttcgcggtcgggcccggtgacgtcatcgtggtcaccgagatggagcaccacgcgaacctcatcccgtggcaggagttggcccggcgtaccggcgcgaccctgcgctggtttggcttgaccgatgacggcgaggtcgacctcgactcgctgaagctggacgagcgagtcaaagtcgtttcgttcagccatcattcgaacgtcaccggtgtcggtgttccggtcgcggacatggtcgcacgcgccaaggcggtcggcgcgttgacggtgctggattcgtgccaggccgtgccgcatcagccggtcgacttccacgccctcgacgtcgatttcgcggcattctccgggcacaagatgctcggccccaccggaatcggagcgctgtacggtcgcgcccgactgctggagcagttgccaccgtttttgaccggcggctccatgatcgagaccgtgacgatggagggcgccacctacgccccgccgccacaacgtttcgaggccggcacccagatgatctcgcaggtcgtcggtttaggcgctgcgacgaggtatctcggcggcatcgggatgagtgccgtcgaggagcacgagcatcgtctcgtcaccgccaccctggaaggcctcgccgcgattcccggggtgcggatcatcggccccgccaccgccgagcgcaggtccccggtggctttcgtggttgacggagtgcacgcccacgacgtcgggcaggtgctcgacgacgacggagtagcggtgcgggtgggacatcactgtgccgcaccgctgcaccgccgcttcggtatcgccgccacagtccgggcgtccttcgcggtgtacaacaccctcgacgaggtggaccggctcatcgccggtgtgcagcgggcgatcgagttcttcggcagggactga

SEQ ID NO: 812 - protein, 415 aa, Mycobacterium vanbaalenii
MTASVDLDVAAIRADFPILKRVMRGGNTLAYLDSGATSQKPLQVLDAERQFLTTSYGAVHRGAHQLMEESTDAYEQGRADIAAFVGAAPGELVFTKNATEALNLVSYVLGDDRSGFAVGPGDVIVVTEMEHHANLIPWQELARRTGATLRWFGLTDDGEVDLDSLKLDERVKVVSFSHHSNVTGVGVPVADMVARAKAVGALTVLDSCQAVPHQPVDFHALDVDFAAFSGHKMLGPTGIGALYGRARLLEQLPPFLTGGSMIETVTMEGATYAPPPQRFEAGTQMISQVVGLGAATRYLGGIGMSAVEEHEHRLVTATLEGLAAIPGVRIIGPATAERRSPVAFVVDGVHAHDVGQVLDDDGVAVRVGHHCAAPLHRRFGIAATVRASFAVYNTLDEVDRLIAGVQRAIEFFGRD

SEQ ID NO: 813 - DNA, 1260 bp, Mycobacterium gilvum
atgaccaccgcacgcacgttggacctcacggtgctcaatagggtccgggcggattttccgatcctgagccgcgtgatgcggggcgggcagcagttggcctacctcgattcgggggcgacgtcgcagaaacccttggcggtgctcgacgccgaacgtgacttcctgctgcactccaacggtgccgtccaccggggcgcacaccagctgatggaggagtccacggacgcctacgagcatggccgcgaggccatcgcgtcgttcgtgggtgccgactccgacgagctggtgttcaccaagaacgcgaccgaggccatcaacctggtggcatatgcgctgggggacaagcggttcgagaacgccatcgggcccggcgacgtgatcgtcaccaccgagctcgagcatcacgcgaacctggttccgtggcaggaactcgtgctgcgcaccggtgcgacgctgaagtggtacggcgtcaccgccgaggggcggatcgacctggattcgctggtgctcgacgagcgggtgaaggtcgttgccttcagccatcattcgaatgtgaccggcgcgatcgcccccgtgtcggagctggtggcgcgcgcgagggccgtcggtgccctcgtggtgctcgacgcctgccagtcggtgccgcatcagccggtcgacttccatgccctcgacgtcgacttcgccgcgttctcggggcacaagatgctggggccgacgggcatcggtgtgctctacgggcgccgcgcgctgctgaacgcactgcctccgtttctgaccggcggctcgatgatcgagaccgtcacgatggaggcgacgacgttcgcacccgcaccgcaacggttcgaggcgggcaccccgatgacctcacaggtcgtcgggttgggtgccgcggcacggtatctcgacgccctggggatgcccgcggtcgaagagcatgagcgggaactcgtcgccgcggccctcgccgggctctcggaggtgccgggcgtgcgggtcatcggtccggcatccatggacgatcgcggctcgccggtgtcgttcgtggtcgacggtgtgcacgcccacgacgtcgggcaggtgctcgacgacgacggagtcgcggtgcgggtgggtcaccactgcgcatggccgctgcatcgcaggttcggtatcgctgcgacggcgcgcgcgtcgttcgcggtgtacaacaccgtcgacgaggtggaccgtctggtggccggcgtgcgccgggcggtcgagttcttcggcagggaatga

SEQ ID NO: 814 - protein, 419 aa, Mycobacterium gilvum
MTTARTLDLTVLNRVRADFPILSRVMRGGQQLAYLDSGATSQKPLAVLDAERDFLLHSNGAVHRGAHQLMEESTDAYEHGREAIASFVGADSDELVFTKNATEAINLVAYALGDKRFENAIGPGDVIVTTELEHHANLVPWQELVLRTGATLKWYGVTAEGRIDLDSLVLDERVKVVAFSHHSNVTGAIAPVSELVARARAVGALVVLDACQSVPHQPVDFHALDVDFAAFSGHKMLGPTGIGVLYGRRALLNALPPFLTGGSMIETVTMEATTFAPAPQRFEAGTPMTSQVVGLGAAARYLDALGMPAVEEHERELVAAALAGLSEVPGVRVIGPASMDDRGSPVSFVVDGVHAHDVGQVLDDDGVAVRVGHHCAWPLHRRFGIAATARASFAVYNTVDEVDRLVAGVRRAVEFFGRE

SEQ ID NO: 815 - DNA, 1254 bp, Mycobacterium tuberculosis
atgacggcctcggtgaactcgctcgatctggcggcgattcgcgccgatttccccatcctcaagcgcatcatgcggggtggaaacccgttggcgtatttggactccggcgccacctcacaacgcccgctgcaggtcctcgacgccgagcgcgagttcctgaccgcgtccaacggcgcggtccatcgtggcgcgcaccagctgatggaggaggcgaccgacgcctacgagcagggccgcgcggacatcgcgttattcgtcggcgccgacacggacgagctggtgttcaccaaaaatgccaccgaggcgctcaacctggtgtcatatgtgctgggggacagccgtttcgagcgtgccgtcggccccggcgacgtgatcgtcaccaccgagctggagcatcacgccaacctgatcccgtggcaggagctggcccggcgcaccggggccacattgcgctggtacggggtgactgacgacgggcgcatcgacctggactcgctgtatctggacgaccgtgtcaaagtcgttgcgttcacccatcattccaatgtgaccggggtgctgacaccggtgagcgagctggtctcccgcgcccaccagtcgggtgcgctgaccgtgctggacgcctgccagtcggtgccgcaccagccggttgacctgcacgaactcggcgtcgacttcgccgcgttttccggacataaaatgctgggccccaacggaatcggtgtgctgtacggccgccgtgagctgctagcgcagatgcccccatttctcaccggcggttcgatgatcgaaacggtgaccatggaaggcgccacctacgcgccggcgccgcaacggttcgaggccggtaccccgatgacctcccaggtggtcgggttggccgccgcggcccgctatctcggcgcgatcggcatggccgcggtggaggcccacgagcgggagctggtagccgcggccatcgaaggcctgtccggcatcgacggtgtgcggatccttggcccgacgtcgatgcgggaccgagggtcgccggtggcgttcgtcgtcgagggcgtgcacgcgcacgacgtgggtcaggtactcgacgacggcggcgtggcggtgcgggtcgggcaccactgcgcgctgccgctgcaccgcaggttcggtctggccgccaccgcgcgggcgtcgttcgcggtgtacaacaccgcagacgaggtggaccgcttggtggccggcgtgcggcgatcccggcatttctttggaagagcgtga

SEQ ID NO: 816 - protein, 417 aa, Mycobacterium tuberculosis
MTASVNSLDLAAIRADFPILKRIMRGGNPLAYLDSGATSQRPLQVLDAEREFLTASNGAVHRGAHQLMEEATDAYEQGRADIALFVGADTDELVFTKNATEALNLVSYVLGDSRFERAVGPGDVIVTTELEHHANLIPWQELARRTGATLRWYGVTDDGRIDLDSLYLDDRVKVVAFTHHSNVTGVLTPVSELVSRAHQSGALTVLDACQSVPHQPVDLHELGVDFAAFSGHKMLGPNGIGVLYGRRELLAQMPPFLTGGSMIETVTMEGATYAPAPQRFEAGTPMTSQVVGLAAAARYLGAIGMAAVEAHERELVAAAIEGLSGIDGVRILGPTSMRDRGSPVAFVVEGVHAHDVGQVLDDGGVAVRVGHHCALPLHRRFGLAATARASFAVYNTADEVDRLVAGVRRSRHFFGRA

SEQ ID NO: 817 - DNA, 1287 bp, Janibacter sp.
atgactgccgcgccgttcaccgatgaggaagtcgcccggattcgggccgacttcccgatcctcgcgcgcaccgtgcgtgacggtgcaccgctcgtctacctcgactcgggtgcgacctcgcacaaacccgtccaggtactcgacgccgagcgtgacttctacgagcgtctgaactccgcgccacaccgcggggcgcacgcactctcggaagaggcgacggcggcatacgaaggagcgcgtgagcgcatcgcggcgttcatcggggcccaggcccaggacgtcgtcttcaccaagaacgcgacggagtcgctcaacctcgtggcctacgccttctcgaactcgccgcacccgggcatcccgggcagcgagcggttcgcgctgggcgagggcgacgaggtgctcgtcaccgagatggagcaccacgccaacctcgtgccgtggcaggaactctgccgccgcacgggagcaacgctgcgctggatccccgtcaccgacggtggccgactcgacctcagcaccctcgacgagctcatcaccgagcgcaccaaggtcgtcgcgttcgtccacgcctccaatgtccttggcaccgtcaacccgctcgacgagatcgtcacgcgggcccacgacgtcggcgcggtcgtcgtgctcgacgcctgccagtcggtgccccacatcggcatcgacgtgaccgagctcgccgcggacttcgtggccttctccggccacaagatgttcgggcccagcggcatcggcgtcctgtggggtcgtcgcgatctgctcgaggccatgccgccgttcctcacgggcggctcgatgatcgagtccgtccgcatggagggcagcacctacgcgccgccgccgcagcgtttcgaggcgggcgtgcccatgacggcccaggccatcgggctcgccgcggccgtggactacatcaacgacctcggcattgatcgcatccacgcgcatgagctggccctcaccgaacgcctgctcgccggtctcgcgacccgctcgtgggtcaccgtggtcggcccgaccgatctcgaatcccgtggcggcacagtcgctttcgtcgtcgacggcgttcacgcccacgacgtcgggcacgtgctcgatgcctccggtgtggccgtgcgggtcggacaccactgcgcctggccgctgcaccgccgcttcaaggtggcggcgacgacgcgggccagcttcgcggcatacaacacgttcgacgaggtcgaggtgctcctcgaagcgctcgaccgcgtcccacagatctatggagtggccagctga

SEQ ID NO: 818 - protein, 428 aa, Janibacter sp.
MTAAPFTDEEVARIRADFPILARTVRDGAPLVYLDSGATSHKPVQVLDAERDFYERLNSAPHRGAHALSEEATAAYEGARERIAAFIGAQAQDVVFTKNATESLNLVAYAFSNSPHPGIPGSERFALGEGDEVLVTEMEHHANLVPWQELCRRTGATLRWIPVTDGGRLDLSTLDELITERTKVVAFVHASNVLGTVNPLDEIVTRAHDVGAVVVLDACQSVPHIGIDVTELAADFVAFSGHKMFGPSGIGVLWGRRDLLEAMPPFLTGGSMIESVRMEGSTYAPPPQRFEAGVPMTAQAIGLAAAVDYINDLGIDRIHAHELALTERLLAGLATRSWVTVVGPTDLESRGGTVAFVVDGVHAHDVGHVLDASGVAVRVGHHCAWPLHRRFKVAATTRASFAAYNTFDEVEVLLEALDRVPQIYGVAS

SEQ ID NO: 819 - DNA, 1305 bp, Salinispora arenicola
atgaccaccatcgcgattccaccgggcatgccgcagtacggcgacgtgccgcgctacgacgtggcggcggtgcgcgccgacttcccgatcctggaccggacggttaacgggcacccgctggtctacctggacagcgcgaacacgtcgcacaagccacggcaggtgctcgacgtactgcgggagcactacgagcggcacaacgccaacgtgtcgcgttcggttcacacgctgggcaccgaggccaccgaggcgtacgagggggcgcgggccaaggtcgccgccttcatcaacgctccgaacccggacgaggtggtgttcaccaagaactccaccgaggcgatcaacatcgtggcgtacgccttctcgaacgcgtcgctgcgccccgacgccgacccgcggttccggttgggccccggagacgaggtggtgatctccgagatggagcaccactcgaacatcgtcccgtggcagctgatctgcgagcgtaccggcgccacgttgcgctggttcccggtcaccgaccacggtcgactcgacgagtcgggtctggcggacctggtcaccgagcggacgaagatcgtctcactggtgcacatgtccaacatcctcggcacggtcaacgccacgtcccggatcacccagcgggtccgtgaggtcggcgcactgctgctgctcgactgttcgcagtcggtgccgcacatgccgatggacgtggtcgactacgacgcggacttcatcgtcttcaccgggcacaagatgtgtggcccgaccggtatcggagtgctctggggccggtccgagctgctcgcggcgatgccgccggtgctcggcggcgggtcgatgatcgagacggtggcgatgtcggggtcgaccttcgccgcgccgccggcccggttcgaggcgggcaccccaccgatcgccgaggcggtcgcgctgggcgcggcggtggactacctgtccggcgtcggcatgcgggccatccagtggcacgagaagcatctcacggcgtacgccctggacgctctggcgacggtgcccgggttacgggtcttcgggccgaccgtgccggtgggtcggggtggcacgatctcgttcgcgctgggcgacatccacccgcacgacgttgggcaggtgctcgactcgctgggtgtgcaggtgcgggtcggtcaccactgtgcccgtccggtctgcacccggttcggcgtgcccgcgatgacccgggcctcgttctacctctacaccaccacggaggagatcgacgccttggtggcgggtctggagcgggtgcggaaggtgttcgactga

SEQ ID NO: 820 - protein, 434 aa, Salinispora arenicola
MTTIAIPPGMPQYGDVPRYDVAAVRADFPILDRTVNGHPLVYLDSANTSHKPRQVLDVLREHYERHNANVSRSVHTLGTEATEAYEGARAKVAAFINAPNPDEVVFTKNSTEAINIVAYAFSNASLRPDADPRFRLGPGDEVVISEMEHHSNIVPWQLICERTGATLRWFPVTDHGRLDESGLADLVTERTKIVSLVHMSNILGTVNATSRITQRVREVGALLLLDCSQSVPHMPMDVVDYDADFIVFTGHKMCGPTGIGVLWGRSELLAAMPPVLGGGSMIETVAMSGSTFAAPPARFEAGTPPIAEAVALGAAVDYLSGVGMRAIQWHEKHLTAYALDALATVPGLRVFGPTVPVGRGGTISFALGDIHPHDVGQVLDSLGVQVRVGHHCARPVCTRFGVPAMTRASFYLYTTTEEIDALVAGLERVRKVFD

SEQ ID NO: 821 - DNA, 1356 bp, Polaromonas sp.
atgaacgccgccgggccgtcccaaggcgcgaaggcccccttggggggcagcgcagcacacgaagtggcaagcgtgggggcacgtatgaacgccccagtgaatgcgaaagaactgactgcacgcgccagcgcgcccgagacagtcctggcagtggcgcggctgcggcaggatttccccatcctgcaccggaccgtgcacggcaagcccctggtctacctggacaacgcggccaccagccagaagccgcagtacgtgatcgactgcgaggcgcgctactacgccgagctgaacgccaacatccaccgcggcgtgcacagcctgagccagcaggcgaccgaggcctatgaggcggcacgcgacacggtgcagcgcttcatccatgcagcccgccgcgaggaaatcgtgttcgtgcgcggcaccaccgaggcgatcaacctggtggcggcgagctacggccagcgcctgcggcccggcgacgaaatcctgatcaccgagatggagcaccactccaacatcgtgccatggcagctgctgtgcgagcgcacgggcgcggtgctgcgcgtcgcgcccatcgacgacgccggcgagttgcgcctcgatgagttcgagcgcctgctgggcccggcgacacgcatcgtcgcgctcacgcagctgtcgaacgcgctcggcagcatcaacccggtgcagcgcctcgtcgcgcttgcccatgcggtgggggcggtggtgctggtcgatggcgcccaggcggtggcccacctgccggttgacgtccaggcgctcgactgcgatttctacgccttctccggccacaagctctacggcccgaccggcatcggcgtgctctacggcaaggcggcgctgctggacgccatgccgccctggcagggcggcggcgacatgatccgcgaggtcaccttcgcccggacgacatacaacgacctgccgtacaagttcgaggccggcaccccgcatatcgcgggcggcatcgccctgggggcggcgatcgactatgtgggcatggtgggtttgcccgccatcgccgcccacgaacacgcgctgctggcctacgccaccgaacaggcggccggaatggccggcctgcgcctcatcggcaccgcccgggacaaggcgagcatcctgtcgttcaccgtggagggcgtgcacccgcacgatgtcggcaccatcctcgacgacgagggggtggcggtgcgcgccggccaccattgcgccatgccggtgatggcgcatttcggcgtgcccgccacggtgcgcgcctcgttcgccctctacaacacagtggaagaagtggatgtgctgctgcgcgcgatccgcagggcgcaggaggtatttggctga

SEQ ID NO: 822 - protein, 451 aa, Polaromonas sp.
MNAAGPSQGAKAPLGGSAAHEVASVGARMNAPVNAKELTARASAPETVLAVARLRQDFPILHRTVHGKPLVYLDNAATSQKPQYVIDCEARYYAELNANIHRGVHSLSQQATEAYEAARDTVQRFIHAARREEIVFVRGTTEAINLVAASYGQRLRPGDEILITEMEHHSNIVPWQLLCERTGAVLRVAPIDDAGELRLDEFERLLGPATRIVALTQLSNALGSINPVQRLVALAHAVGAVVLVDGAQAVAHLPVDVQALDCDFYAFSGHKLYGPTGIGVLYGKAALLDAMPPWQGGGDMIREVTFARTTYNDLPYKFEAGTPHIAGGIALGAAIDYVGMVGLPAIAAHEHALLAYATEQAAGMAGLRLIGTARDKASILSFTVEGVHPHDVGTILDDEGVAVRAGHHCAMPVMAHFGVPATVRASFALYNTVEEVDVLLRAIRRAQEVFG

SEQ ID NO: 823 - DNA, 1272 bp, Nitrosomonas eutropha
atgaaaattgttgacacattagtgacttcatctgcacagcaaacaactactgtacctggaatagggcaatttcgtgcagattttccgattcttgatatcaaggtagatgacaaaccgctgatttatcttgacaacgctgcttctagccaaatgccgcaggcagtcattgattgtctggttcgttaccagaaaactcagcatgcaaatattcatcgtgcggtacattatttatccaacctggctacacaggaatatgaagcagcacggtgtaaactgcaaaattttatcggtgcgcgtgaagatagagaggtgatatttactagtggtacaactgacagtatcaatctggtgatgcatgggtatggacgtaaattcattcagcgtggcgatgaaattattttgtccgagctcgaacatcattccaatattgtgccttggcagatgttggccgaggaaagaggtgcgcatatccgggtagccccaattaatgatgcaggtgagcttctggtggaggaatatgaaaaactttttaattccaagacccgatttgtagctttgtcgcatgtttccaatgcacttggtagcatcaatccgatcaaacgcatgattgccatagcacatcagcatgatgttcctgttttgattgatggcgcccaggcagcgcctcatttgaaaatagatgtgcaggatctcgattgcgatttttatgctttctcggcgcacaaaatgtgcgggcccaccgggattggtattttgtacggaaaggcgcatttgcttgaatctatgcaaccattcaaaggaggaggggacatgattgcttcagtttcctttgaaaaaacaacatataacgagataccatataaatttgaggcaggtactcctcctattgcggcggccataggttttggtgcggcaattgattatctggaacagatcggccttgatgctattgctgattatgaacatgagctgctgctttatgcttctgagcaaatcagaatgatcccaggcgtgaaaatcataggcgattgcccggataaggttgcggtgatatcgtttgttattgatggtattcatccgcatgatgttggtactttactgaaccaggaaggtatagctgtgcgcacagggcatcattgtgcacaaccgattatgcagcgttttaatgtggcggcaacgtcgcgtgcctcattttctttttataatactaaaaaagagatcgatgctctggtggcaggtattcggtctgtacaaaaggttttcgcacaatga

SEQ ID NO: 824 - protein, 423 aa, Nitrosomonas eutropha
MKIVDTLVTSSAQQTTTVPGIGQFRADFPILDIKVDDKPLIYLDNAASSQMPQAVIDCLVRYQKTQHANIHRAVHYLSNLATQEYEAARCKLQNFIGAREDREVIFTSGTTDSINLVMHGYGRKFIQRGDEIILSELEHHSNIVPWQMLAEERGAHIRVAPINDAGELLVEEYEKLFNSKTRFVALSHVSNALGSINPIKRMIAIAHQHDVPVLIDGAQAAPHLKIDVQDLDCDFYAFSAHKMCGPTGIGILYGKAHLLESMQPFKGGGDMIASVSFEKTTYNEIPYKFEAGTPPIAAAIGFGAAIDYLEQIGLDAIADYEHELLLYASEQIRMIPGVKIIGDCPDKVAVISFVIDGIHPHDVGTLLNQEGIAVRTGHHCAQPIMQRFNVAATSRASFSFYNTKKEIDALVAGIRSVQKVFAQ

SEQ ID NO: 825 - DNA, 1254 bp, Mycobacterium sp.
atgaccaccgcggcgagccggctggacgtgcccgggatccgcgcggatttcccgatcctgcagcgggtgatgcgtggcggaaatcaactggcatacctcgattccggcgcgacgtcgcagcgtccgctgcaggtgctcgacgccgaacgtgagttcctgaccacctcttacggtgcggtgcatcgcggtgcccaccagttgatggaggagtcgaccgacgcctacgaggccggtcgtgccgacatcgcggcgttcgtcggcgccgacaccgacgagttggtcttcacgaagaacgccaccgaggcgctcaacctcgtctcctacgtgctgggtgacgaccggttcgagggtcacgccgtcggaccgggcgacgtcatcgtcaccaccgaactcgagcaccacgcgaatctgatcccgtggcaggaactcgcccggcggacgggtgccacgctgaagtggtattcggtcaccgacgacggccgcatcgatctggactcgctcgacctcgacgagcgcgtgaaagtcgttgccttcacccaccactcgaacgtcaccggcgcggtggccccggtggccgaactggtgtcccgggccagggcggtcggcgcgctgaccgtgctcgatgcctgccaatcggtaccgcaccagccgatcgacttccacgccctcgacgtcgactacgccgcgttctcgggtcacaagatgctgggccccaacgggatcggtgtgctctacggacgccgcgagttgctggccgagatgccgccgttcctcaccggcggctcgatgatcgagacggtcaccatggagggcgccacctacgcgcccgctccgcagcggttcgaggcgggcacaccgatgacctcgcaggtcgtcgggttggccgcggcggcacgctacctgtcgacgatcgggatggccgaggtcgaggcgcacgaggccgaactggtcgccgctgcgctggaggggctttcgggcatcgacggcgtccgcgtcgtcgggccgctgtccctggtcgaccgcggatcgccggtgagcttcgtcgtcgacgggatccacgctcacgacgtcggccaggtcctcgacgacgacgccgtggccgtgcgcgtcgggcaccactgcgcgtggccgctgcaccgccgcttcggcatcaccgccaccgcccgggcgtcgttcgcggtgtacaacacctccgacgaggtcgagcggctggtggccggtgtccggcacgccgtcgagttcttcgggaggtga

SEQ ID NO: 826 - protein, 417 aa, Mycobacterium sp.
MTTAASRLDVPGIRADFPILQRVMRGGNQLAYLDSGATSQRPLQVLDAEREFLTTSYGAVHRGAHQLMEESTDAYEAGRADIAAFVGADTDELVFTKNATEALNLVSYVLGDDRFEGHAVGPGDVIVTTELEHHANLIPWQELARRTGATLKWYSVTDDGRIDLDSLDLDERVKVVAFTHHSNVTGAVAPVAELVSRARAVGALTVLDACQSVPHQPIDFHALDVDYAAFSGHKMLGPNGIGVLYGRRELLAEMPPFLTGGSMIETVTMEGATYAPAPQRFEAGTPMTSQVVGLAAAARYLSTIGMAEVEAHEAELVAAALEGLSGIDGVRVVGPLSLVDRGSPVSFVVDGIHAHDVGQVLDDDAVAVRVGHHCAWPLHRRFGITATARASFAVYNTSDEVERLVAGVRHAVEFFGR

SEQ ID NO: 827 - DNA, 1341 bp, Frankia alni
atgacgctcaccgagtcgctggtcgccggcggcaccgcgggcaccgtgggcgctgcgggcaccgcgggcttcgacgtcgagcaggtccgcaaggacttcccgatcctggcccgcacggtgcacgacgacctgccgctggtctacctcgacagcgccgccacctcgcagaagccgctggccgtcctcgacgccgagcgcgcctactacgagctgcacaacgccaacgtgcaccgcggcatccacgtgctcgccgaggaggccaccggcctgtacgaggcgacgcgggacaaggtcgccgcgttcgtcggcgcgaccgaccggcgcgaggtcgtcttcacgaagaactccaccgaggcgctcaacctcgtcgcctacgccatgagcaacgccgagaccaccggcgcggaggcggagcgcttccggctcggccccggcgacgagatcgtcgtcaccgagatggagcaccactccaacctggtgccctggcagatgctcgcccggcgcaccggcgccaccctgcgctggatcgggctgaccgacgacggccggctgaacctcgacaacctcgacgcggtcatcaccgaccgggcgaaggtcgtctcgatggtccaccagtcgaacatcctcggcacggtcaacccggtggcgcggatcgtcgcccgggcccgcgaggtcggcgcgctcaccgtgctcgacggctcccagtcggtgccgcacatgccgatcgacgtcgccgcgctcggcgtcgacttcctggccttcaccggccacaagatgtgcgcgccgaccggcgtcggggtgctctgggggcgctacgagctcctcgaggtcatgcccccgttcctcggcggcggcgagatgatcgagatcgtcacgatggaggggtcgacctacgcggccccgccgcaccgcttcgaggccggcaccccgatgatcagccaggtcgtggggctcggcgccgccgtcgactacctgacggcgctgggcatgccggcgatcgccgcgcacgagcacgccgtcaccgcctacgccctcgacgcgctggccaccgtccccggcacccggatcatcggcccgccgaccgacgtcgaccgcggcggggcgatctcgttcgtcctgcacgacgacgccggccgggcgatccacccccacgacgtcggccagctcctcgacgagcgcggcatcgccgtgcgcgtcggccaccactgcgcccggccggtctgcctgcgcttcggcgtgccggccacgacccgggcgtcgttccacctgtacacgacgaccggcgaggtcgacgcgctggtggaaggtctgcacggggttcggaggttcttctcgaggtga

SEQ ID NO: 828 - protein, 446 aa, Frankia alni
MTLTESLVAGGTAGTVGAAGTAGFDVEQVRKDFPILARTVHDDLPLVYLDSAATSQKPLAVLDAERAYYELHNANVHRGIHVLAEEATGLYEATRDKVAAFVGATDRREVVFTKNSTEALNLVAYAMSNAETTGAEAERFRLGPGDEIVVTEMEHHSNLVPWQMLARRTGATLRWIGLTDDGRLNLDNLDAVITDRAKVVSMVHQSNILGTVNPVARIVARAREVGALTVLDGSQSVPHMPIDVAALGVDFLAFTGHKMCAPTGVGVLWGRYELLEVMPPFLGGGEMIEIVTMEGSTYAAPPHRFEAGTPMISQVVGLGAAVDYLTALGMPAIAAHEHAVTAYALDALATVPGTRIIGPPTDVDRGGAISFVLHDDAGRAIHPHDVGQLLDERGIAVRVGHHCARPVCLRFGVPATTRASFHLYTTTGEVDALVEGLHGVRRFFSR

SEQ ID NO: 829 - DNA, 1305 bp, Salinispora tropica
atgaccacgatcgcgattccaccgggcatgccgcagtacggcgacgtgccacgctacgacgtggcggcggtgcgcgctgactttccgatcctggaccggacggtcaacgggcacccgctggtctacctggacagcgcgaacacgtcgcacaagccacggcaggtgctcgacgtgctgcgggagcactacgagtggcgcaacgcgaacgtgtcgcgttcggtccacacgctgggcaccgaggcgaccgaggcgtacgagggcgcgcgagccaaggtcgccaccttcatcaacgccccgagcccggatgaggtggtgttcaccaagaactccaccgaggcgatcaacatcgtggcgtacgccttctcgaacgcgtcgctgcgtcccgacgccgacccgcggttccggttgggcccgggagacgaggtggtgatctccgagatggagcaccactcgaacatcgtcccctggcagttgctctgtgagcgcaccggcgccacactgcgctggttcccggtcaccgaccacggccggctggacgagtcgggcttgacggacctggtcaacgagcggacgaagatcgtctcgctggtgcacatgtccaacattctcggcaccgtcaacgcgacgtcccggatcactcggcgggtccgggaggtcggcgcgctgctgctgctcgactgttcgcagtcggtgccgcacatgccgatggacgtggtcgactacgacgcggatttcatcgtcttcaccgggcacaagatgtgtgccccgagcggcatcggagtgctctggggccgtaccgagttgctggcggcgatgccgccggtgctcggcggcgggtcgatgatcgaaacggtggcgatgtcggggtcgaccttcgctccgccgccgacccggttcgaggcgggcaccccaccgatcgccgaggcggtcgcgttgggcgcggcggtggactacctctccggtgtgggcatgcgggccattcagtggcacgagaagcaactcaccgcgtacgccctggatgccttggcgacggtgcccgagttgcggatcttcgggccgaccgtaccggtaggtcggggcggaacgatctcgtttgcgctgggtgacatccatccgcacgacgttgggcaggtgctcgactcgctgggcgtgcaggtgcgagtcggtcaccactgcgcccgtccggtctgcacccggttcggggtgccggccatgacccgggcctcgttctacctctacaccaccacggaggagatcgacgccctggtggcgggtctggagcaggtgcggaaggtgttcgcctga

SEQ ID NO: 830 - protein, 434 aa, Salinispora tropica
MTTIAIPPGMPQYGDVPRYDVAAVRADFPILDRTVNGHPLVYLDSANTSHKPRQVLDVLREHYEWRNANVSRSVHTLGTEATEAYEGARAKVATFINAPSPDEVVFTKNSTEAINIVAYAFSNASLRPDADPRFRLGPGDEVVISEMEHHSNIVPWQLLCERTGATLRWFPVTDHGRLDESGLTDLVNERTKIVSLVHMSNILGTVNATSRITRRVREVGALLLLDCSQSVPHMPMDVVDYDADFIVFTGHKMCAPSGIGVLWGRTELLAAMPPVLGGGSMIETVAMSGSTFAPPPTRFEAGTPPIAEAVALGAAVDYLSGVGMRAIQWHEKQLTAYALDALATVPELRIFGPTVPVGRGGTISFALGDIHPHDVGQVLDSLGVQVRVGHHCARPVCTRFGVPAMTRASFYLYTTTEEIDALVAGLEQVRKVFA

SEQ ID NO: 831 - DNA, 1269 bp, Nitrosomonas europaea
atgaaaatggtcgatgcattattgacaccttctgtacgacagacgatagcatccggaatggagcggttgcgtgcagatttcccgattcttgatatcaaggtgggtgacaaaccactggtttatctcgacaacgctgcttccagtcagatgccgcaagccgtaatcgatcgcctggtgcattaccagaaaacccagcatgccaatattcatcgcgcggtacatcatttatccgatctcgccacccaggagtatgaggccgctcggcgcaagctgcagcatttcatcggtgcccgtgaagagagagaggtgattttcaccagtggtacgactgacagtatcaatctggttatgcatggatatggacgtaaatttattcagaatggagatgaaatcatcctgacagcgcttgagcaccattccaatatcgtgccatggcaaatgctggctgaagaaaaaggtgcgcgtatccgggtagttccgatcaacgatgcgggcgagcttctggtggatgaatatgaaaaacttttcaattccagaacccggtttgtgggtttgtcacatgtttccaatgcactgggcagtatcaacccgatcaaacgcatgattgccacggcgcatcagcacggtgtgcctgttctgatcgatggtgcccaggcagcaccccacatgaaaatcgatgtgcaggatctcgactgtgatttttatgcattttcagcacataaaatgtgtggccctaccggggtcggtattctatacggtaaagcacatctgcttgaatccatgcagccattcaaaggggggggggatatgattgcctcagtctcctttgaaaaaacgacctacaacgatattccgtacaagtttgaggcgggtactcctcccattgctgcagtaataggctttggtgctgccattgattatctggaacagatcggcctggatgccattgccgcttatgaacatgagttgctggtttatgcatcagaacagatcaggatgattccaggtgtgagaatcgtgggtgattgtccggataaagtggcagtaatatcgtttgtcgtggatggtattcatccgcatgatgtcggcacgttactgaatcaggatggaatcgccgtacgcacgggccaccattgtgcgcagccgatcatgcagcgtttcaatgtagcggcgacatcacgtgcttcattttcgttttataacactaaagaagagatcgaggtcctggtggcgggtattcgatccgtacaaaaggttttcgcacaatga

SEQ ID NO: 832 - protein, 422 aa, Nitrosomonas europaea
MKMVDALLTPSVRQTIASGMERLRADFPILDIKVGDKPLVYLDNAASSQMPQAVIDRLVHYQKTQHANIHRAVHHLSDLATQEYEAARRKLQHFIGAREEREVIFTSGTTDSINLVMHGYGRKFIQNGDEIILTALEHHSNIVPWQMLAEEKGARIRVVPINDAGELLVDEYEKLFNSRTRFVGLSHVSNALGSINPIKRMIATAHQHGVPVLIDGAQAAPHMKIDVQDLDCDFYAFSAHKMCGPTGVGILYGKAHLLESMQPFKGGGDMIASVSFEKTTYNDIPYKFEAGTPPIAAVIGFGAAIDYLEQIGLDAIAAYEHELLVYASEQIRMIPGVRIVGDCPDKVAVISFVVDGIHPHDVGTLLNQDGIAVRTGHHCAQPIMQRFNVAATSRASFSFYNTKEEIEVLVAGIRSVQKVFAQ

SEQ ID NO: 833 - DNA, 1251 bp, Leptospira interrogans
ttgacagatatgagtttctctgccgaaagaattagaaccgacttcccgattttgggaactaagatgaacgggaaaccactcgtttttttagatagcgccgctagttctcagaaaccgtttacggttattgatacgatcgagaagtattatcgagaagagaacgccaacattcatcgtggaatttattatctttctcaaaaagctactgaaaaatatgaactgagtaggattcgtctttctaaatttatcggagcgcaatgcgcaaaggtttgtatttttacgagaaacgccacagagtcgatcaatttagtcgcccaaacttgggggagaactcagattaaagaaggggatgagatcgtactcaacgaattagagcatcattctaacatcgtaccttggcagatgttggcccaggaaaaaaaagcggtcttaaaattcattcctttaaacgaagatagtactttagatttttctaatttacaagagattatcacaaccaaaacaaagttagttgctatttctcagatgtctaacgtgaccgggacgattcatgatattcttcccgtgcaaaaacgtgcaaaagaagtaggcgccaaactattagtagacggtgctcagggagtttgtcatcttcctgtaaatatgaaggaaatggaatatgatttttatgttttttctgcgcataagatgttgggtccgaccggagtaggggttttgtatgcaaaggaagaaatcttagaagagatgcctccttggatgggtggaggagatatgattgctcaagtatataaggaaaaatctacttatgcggaacttccatccaaactggaagcgggaactccgaatattgcgggcgtaattggatttggatctgcgatcgaatatctcgaaaatatagggatgcaagaaattagaaatcatgaaatagaattgctctcgtatgctttgaatcgattggatgattttggtggtttggaactttatggaactagggatttatccaaaagaggaggagtgatttcttttaactttccaggtgtacatcctcatgacgtaggaacaattttagacgaagagggaattgcaatccgagtcgggcatcattgtgcgcaaccttttatggcgtttcaaaatattcctgggacttgtcgggcgagtctttatctttataatacaaaagatgacattgatcgattgattcaaggtctaattaaggtaaaggagattttctcccgtgtccttaagcgatag

SEQ ID NO: 834 - protein, 416 aa, Leptospira interrogans
MTDMSFSAERIRTDFPILGTKMNGKPLVFLDSAASSQKPFTVIDTIEKYYREENANIHRGIYYLSQKATEKYELSRIRLSKFIGAQCAKVCIFTRNATESINLVAQTWGRTQIKEGDEIVLNELEHHSNIVPWQMLAQEKKAVLKFIPLNEDSTLDFSNLQEIITTKTKLVAISQMSNVTGTIHDILPVQKRAKEVGAKLLVDGAQGVCHLPVNMKEMEYDFYVFSAHKMLGPTGVGVLYAKEEILEEMPPWMGGGDMIAQVYKEKSTYAELPSKLEAGTPNIAGVIGFGSAIEYLENIGMQEIRNHEIELLSYALNRLDDFGGLELYGTRDLSKRGGVISFNFPGVHPHDVGTILDEEGIAIRVGHHCAQPFMAFQNIPGTCRASLYLYNTKDDIDRLIQGLIKVKEIFSRVLKR

SEQ ID NO: 835 - DNA, 1248 bp, Mycobacterium avium
atgacggcgacacaactggatgtggccgcgatccgcgccgatttccccattctgaaacggatcatgcgcagcggaaaccagttggcgtacctggattccggtgcgacgtcgcaacgcccactgcaggtgctcgacgccgagcgggaattcctgctgacctccaacggcgccgtgcaccgcggcgcgcaccagctgatggaggagtccaccgacgcctacgagcagggccgcgccgacatcgcggcgttcgtcggcgccgacccggacgagctggtgttcaccaagaacgccaccgaggcgctcaacctggtgtcgtacgtggtgggggacaaccgtttcgagggggccgtcggccccggcgacgtgatcgtcaccaccgagctggagcatcacgccaacctggtgccgtggcaggagttggcccggcgcaccggcgccagcctgcgctggtacggcgtcaccgacgacgggcggatcgacctggactcgttgcagctcgacgagcgggtcaaagtggttgccttcagccatcattcgaacgtgaccggcgcggtggcgccggtggccgagctggtggggcgggcccgcgcggtgggcgcgctgacggtgctggacgcctgtcagtcggtgccgcaccagccggtggacttccacgcgctcgacgtcgacttcgccgcgttctccgggcacaagatgttgggccccaacgggatcggcgtgctctacgggcgccgcgaggtgttgtcgcagctgccgccgttcctcaccggtggctcgatgatcgagaccgtgaccatggagtcctccagctacgcgcaggtgccgcagcggttcgaggccggcaccccgatgacctcccaggtggtcgggttggccgcggccgcccgctatctcggcgccttcggcatggacgcggtgcaggcccacgaggagcggctggtcgccgcggccatcgagggcctgtccggtatcgacgcggtccgcatcgtcgggccgacgtcgaccgaaaaccgtggctcgccggtgtctttcgtcgtcgacggggtgcacgcgcacgacgtcgggcaggtgctcgacgacgagggcgtggcggtgcgggtgggccaccactgcgcgctgccgctgcaccgccggttcggattggcggccaccgcccgggcgtccttcgcggtgtacaacaccgccgaggaggtcgaccgcctggtggcgggtgtgcgccgcgccctggacttcttcggcggagtgtga

SEQ ID NO: 836 - protein, 415 aa, Mycobacterium avium
MTATQLDVAAIRADFPILKRIMRSGNQLAYLDSGATSQRPLQVLDAEREFLLTSNGAVHRGAHQLMEESTDAYEQGRADIAAFVGADPDELVFTKNATEALNLVSYVVGDNRFEGAVGPGDVIVTTELEHHANLVPWQELARRTGASLRWYGVTDDGRIDLDSLQLDERVKVVAFSHHSNVTGAVAPVAELVGRARAVGALTVLDACQSVPHQPVDFHALDVDFAAFSGHKMLGPNGIGVLYGRREVLSQLPPFLTGGSMIETVTMESSSYAQVPQRFEAGTPMTSQVVGLAAAARYLGAFGMDAVQAHEERLVAAAIEGLSGIDAVRIVGPTSTENRGSPVSFVVDGVHAHDVGQVLDDEGVAVRVGHHCALPLHRRFGLAATARASFAVYNTAEEVDRLVAGVRRALDFFGGV

SEQ ID NO: 837 - DNA, 1242 bp, Thermotoga maritima; identical to SEQ ID NO: 761

SEQ ID NO: 838 - protein, 413 aa, Thermotoga maritima; identical to SEQ ID NO: 762

SEQ ID NO: 839 - DNA, 1224 bp, Pectobacterium atrosepticum
atgagttatcctattgagcgagttcgtgctgatttcccgttgctggcaagcgaggttaacggccaaccgttagcctatctggatagtgccgcgagtgcgcaaaagccgcattcggttatcgatcgtgaagctgaattctatcgccatgaatacgccgctgtgcatcgcggcattcatacgctgagcgcacaggcgaccagtgcgatggaagctgtacgcgagaaggtggcatcttttatcaatgccgcttcagcggaagagattgtctttgtacgtgggacgacggaggccatcaatctggtggccaacagctatggtcgcaccttcatccagccgggcgataacctgatcatcaccgagatggagcaccacgcgaatattgttccctggcagatgctggcggaagcgcatggcgttgaagttcgtgtattgccgctagctgaagatggctcgctggatgtggcacagcttcccgtactgttggatgaacgcactcgtctgctggcggtgacgcagatatccaacgtattgggcacgctgaacccagtgaaagcgatgattgcgcaggcaaaagcggcgggtgctgttgtgttgatcgatggtgcacagtcgattatgcatcagcctgtcgatgtgcaggatctggattgcgatttctttgtcttttcaggacataagatctacggcccttcaggcattggtgtgctgtatggcaaacgtgacctgcttcaagccatgccaccgtgggaaggcggcggggcgatgattcgtcaggtcagcctgcgtacgggcatcacctatgctgattcaccgtggcgctttgaagctggatcgcctaacacgggcggtattatgggcttaggtgccgcactggattatgtgacggcactgggacgtgaagatattcagcgttatgaatcttcgctgatgcagtacgcgcttgaagcgttaacgcaggttcccgatctgaccttgtacggtcctgctgaacgtcacggtgttattgcgtttaaccttgggcagcaccacgcctatgatgtgggaagtttcctcgatcggtacggtattgcgattcgcaccggccaccattgcgcgatgccgctgatggaacactatggtgttcccagtatgtgccgcgcctcgctggccgtttatactacgcgcgaagaaattgaccggctagttgccggattgcaacgtatccatcgattgctgggcagttaa

SEQ ID NO: 840 - protein, 407 aa, Pectobacterium atrosepticum
MSYPIERVRADFPLLASEVNGQPLAYLDSAASAQKPHSVIDREAEFYRHEYAAVHRGIHTLSAQATSAMEAVREKVASFINAASAEEIVFVRGTTEAINLVANSYGRTFIQPGDNLIITEMEHHANIVPWQMLAEAHGVEVRVLPLAEDGSLDVAQLPVLLDERTRLLAVTQISNVLGTLNPVKAMIAQAKAAGAVVLIDGAQSIMHQPVDVQDLDCDFFVFSGHKIYGPSGIGVLYGKRDLLQAMPPWEGGGAMIRQVSLRTGITYADSPWRFEAGSPNTGGIMGLGAALDYVTALGREDIQRYESSLMQYALEALTQVPDLTLYGPAERHGVIAFNLGQHHAYDVGSFLDRYGIAIRTGHHCAMPLMEHYGVPSMCRASLAVYTTREEIDRLVAGLQRIHRLLGS

SEQ ID NO: 841 - DNA, 1266 bp, Corynebacterium glutamicum
atgtccgatttcctcaatgcagatggatccctcaatgtggataaggtgcgggaagaattcccaatcctgaagcgcactgttagggatgggaaaccgcttgcttacctggactcaggtgcgacatcgcagcgacccgagcgggtgtggcgtgcagaggagcactttgtgctgcacaccaacgcccccgtgcaccgcggtgcctaccaactggctgaggaagcaacggatgcttatgaaggtgcccgcgagaagatcgctgcctttgttggtgccgagcagcatgaaattgcgttcactaagaatgcaactgaagcactcaatcttgttgcgtacaccttgggtgatgaccgttccggtaagtatcgtgtccaggccggggataccgtggtcatcacggagctagagcaccacgcaaacttggtgccatggcaggagctgtgccgtcgaaccggtgcgacattgaagtggtacaaggtgactgaagatggtcgcattgatctcgattcactcgagcttgatgaaactgtcaaggtcgttgccttcactcaccagtccaatgtgaccggtgctgtggctgatgttccagagttggttcgtcgtgccaaggctgtcggcgctctcacggtgcttgatgcgtgccagtctgttcctcatatgccagtgaatttccacgagctggatgtagatttctctgcattctctggccataagatgctgggacctgcaggcgtgggcgttgtgtatgcaaagtccccaatcttggatgaactgccaccatttttgactggtggttccatgattgaagttgtcaccatggagggttccacctacgctgccgcacctcaacgttttgaggccggcacgcagatgaccagccaggttgtgggcttgggtgctgccgtggacatgctgaatgaaatcggtatggaagcaatcgcagcgcatgagcacgcattgactgcttacgcgttggaaaagctcacggcaattaagggactaaccattgctggtcctttgactgcagagcagcgcggcggtgcaatcagcttcggtgtcgagggcattcacccacacgatctaggccaagtgcttgacgatcagggcgtgaatatccgcgtcggccaccactgcgcgtggcccgtgcaccgcagcatgaacgtacaatcgacagcaagagcatctttctatctctataacaccttcgaagaaatcgaccgcctcgcggcagcgatcgagaaggccaagcaattctttggagttgagtaa

SEQ ID NO: 842 - protein, 421 aa, Corynebacterium glutamicum
MSDFLNADGSLNVDKVREEFPILKRTVRDGKPLAYLDSGATSQRPERVWRAEEHFVLHTNAPVHRGAYQLAEEATDAYEGAREKIAAFVGAEQHEIAFTKNATEALNLVAYTLGDDRSGKYRVQAGDTVVITELEHHANLVPWQELCRRTGATLKWYKVTEDGRIDLDSLELDETVKVVAFTHQSNVTGAVADVPELVRRAKAVGALTVLDACQSVPHMPVNFHELDVDFSAFSGHKMLGPAGVGVVYAKSPILDELPPFLTGGSMIEVVTMEGSTYAAAPQRFEAGTQMTSQVVGLGAAVDMLNEIGMEAIAAHEHALTAYALEKLTAIKGLTIAGPLTAEQRGGAISFGVEGIHPHDLGQVLDDQGVNIRVGHHCAWPVHRSMNVQSTARASFYLYNTFEEIDRLAAAIEKAKQFFGVE

SEQ ID NO: 843 - DNA, 1302 bp, Clavibacter michiganensis
atgcacaccgcaccgcaggacgcccccggcgacggcacggcgcgatccgccggcctcaccgccgacgagatcgaccggatccgccgcgacttccccctcctcgactcggaggtgaacggccacccgctcgtctacctcgactcggccgccacctcccagaagccgcgccaggtgctggacgcggagcgcgcgtacctggagcaccgcaacgccgccgtccaccgcggcgcgcacacgctcgcggccctcgcgacggaggagttcgaggaggcacgggagaaggtcgcgcgcttcgtgggcgtcgatgccggcgagatcgtgtggacatccaacgcgaccgaggggctgaacctcgtcgcgtacggcctcgggagcgctgccgcgccggcgtccatccgcgtgcgggagggcgacgagatcgtcgtcacggagtcggagcaccacgccaacctgatcccgtggcagcagctcgcgctgcgcacgggcgccacgctgcgcttcatccccgtcgacgaccagggcgcgctgcggctggagacgctgggcgacgtgatcacggagcgcacgcgcgtcgtcgcgctcgcgcacgtctccaacgtgctgggcggggtggcgccgctcggccccgtgatcgcccgggctcgggaggtgggcgcgctcgtcgtgctcgacgcctgccagtccgtgccgcacctgccggtcgacctccgcgcgctcgacgtcgacctcgccgtcttctccgggcacaagatgctcgcccccaccgggatcggcgtgctgtacggacgccgccaggtgctcgaggcgctgccgccgttcctcaccggcgggtcgatgatcacgaccgtcacgatggagtcggccgagttcctcccgccgccgcagcgcttcgaggccggcacgcagcgcatctcgcaggtcgtggcgctgggcgcggcggtcgactacctcgaggccgtcggcatggaccggatccaggagcacggccggcgcatcggcgcgcggctcgtcgcgggcctctcggggatccggggcgtgcgcgtgctcgggccccacgaggaccgcatcgggctcgcggcgttcgacctggcgggcgtgcacgcgcacgacgtggggcagatcctcgacgaccgcggcatcgccgtgcgcgtcgggcaccactgcgcgcagccgctgcaccgccggctggggctcaccgcgtccacgcgcgcgagcagcaccctgcacaccaccgacgccgagatcgacctgctgctgcagggcgtcgaggacgccgccgccttcttcggggccggccgatga

SEQ ID NO: 844 - protein, 433 aa, Clavibacter michiganensis
MHTAPQDAPGDGTARSAGLTADEIDRIRRDFPLLDSEVNGHPLVYLDSAATSQKPRQVLDAERAYLEHRNAAVHRGAHTLAALATEEFEEAREKVARFVGVDAGEIVWTSNATEGLNLVAYGLGSAAAPASIRVREGDEIVVTESEHHANLIPWQQLALRTGATLRFIPVDDQGALRLETLGDVITERTRVVALAHVSNVLGGVAPLGPVIARAREVGALVVLDACQSVPHLPVDLRALDVDLAVFSGHKMLAPTGIGVLYGRRQVLEALPPFLTGGSMITTVTMESAEFLPPPQRFEAGTQRISQVVALGAAVDYLEAVGMDRIQEHGRRIGARLVAGLSGIRGVRVLGPHEDRIGLAAFDLAGVHAHDVGQILDDRGIAVRVGHHCAQPLHRRLGLTASTRASSTLHTTDAEIDLLLQGVEDAAAFFGAGR

SEQ ID NO: 845 - DNA, 1329 bp, Frankia sp.
atgacgctgaccgacgcggccgtgcgcccggggtccggaccccggctcgtcggcgggttcgacgtcgagcaggtccgccgggacttccccgtcctggcccgcacggtgcacggcgaccggccgctggtctacctcgacagcgccgccacctcgcagaagccgctggcggtgctcgacgccgagcggacctactacgagctgcacaacgccaacgtgcaccgcggcatccacgtgctggccgaggaggccaccgggctgtacgaggcctcccgggacaaggtcgccgccttcatcggggcgggcgaccgccgggaggtggtgttcaccaagaactcctcggaggcgctgaacctcgtcgcctacgcgatgagcaacgccggggccgccggcgccgaggcggagcggttccgggtcggcccgggtgacgagatcgtcgtcaccgagatggagcatcactccaatctcgtgccgtggcagatgctggcccggcgcaccggggcgacgctgcgctggatcgggctgaccgacgacggccggctcgacctgagcaacctcgattcgatcatcaccgagcgggcgaaggtcgtcgccttcgtccaccagtcgaacattctcggcacgatcaacccggtcgcgcaggtggtggcgcgggcccgcgaggtcggcgcgctgaccgtgctcgacggctcccagtcggtaccgcacaacccggtcgacgtcaccgagctcggggtggacttcctggccttcaccgggcacaagatgtgcgcgcccaccggggtcggggtgctctggggacgctacgagctgcttggggtcatgccgcccttcctcggcggcggcgagatgatcgagcttgtcaccatggagggctcgacctacgcggcgccgccgcaccggttcgaggccggcaccccgatgattgcccaggtggtcgggctcggcgcggccgtcgactacctgaccgcgctcggcatgccggccgtcgccgagcacgagcacgcggtgacggcctacgcgctggacgccttcgccgaggtgccggggttgcggatcatcggtccgccggcggcggacgcccgcggcggggcgatctcctttgtgctgcacgaggacgacggccggccgatccatccccacgacgtcggacagatcctcgacgagcgcggcattgccgtgcgggtcgggcaccactgcgcccggccggtctgcctgcggttcggggtacctgcgacgacccgcgcgtcgttccacctctacacgacgaccggcgaggtcgacgccctggtggaaggactgcacggggtccggaggttctttctgaggtga

SEQ ID NO: 846 - protein, 442 aa, Frankia sp.
MTLTDAAVRPGSGPRLVGGFDVEQVRRDFPVLARTVHGDRPLVYLDSAATSQKPLAVLDAERTYYELHNANVHRGIHVLAEEATGLYEASRDKVAAFIGAGDRREVVFTKNSSEALNLVAYAMSNAGAAGAEAERFRVGPGDEIVVTEMEHHSNLVPWQMLARRTGATLRWIGLTDDGRLDLSNLDSIITERAKVVAFVHQSNILGTINPVAQVVARAREVGALTVLDGSQSVPHNPVDVTELGVDFLAFTGHKMCAPTGVGVLWGRYELLGVMPPFLGGGEMIELVTMEGSTYAAPPHRFEAGTPMIAQVVGLGAAVDYLTALGMPAVAEHEHAVTAYALDAFAEVPGLRIIGPPAADARGGAISFVLHEDDGRPIHPHDVGQILDERGIAVRVGHHCARPVCLRFGVPATTRASFHLYTTTGEVDALVEGLHGVRRFFLR

SEQ ID NO: 847 - DNA, 1248 bp, Gluconacetobacter diazotrophicus
atggatgtctcgcccgccgtcatgcccgacccgatcgacgccctgcgcgcccgccgcgacgatttcccgatcctgaacgagagggtgcacggcaagccgctggtcttcctggacagcgcggcctcggcccagaagccgcttccggtcatcgaggcgatggcggagacgatgcgtacccagtacgccaacatccatcgcggcctgcactggatgagcgagcggaccaccgacgcgtacgagggcgtgcgcgaccaggtcgccggcctgatcggtgcggcgcgcgaggaaatcatcttcacgcgcaacagcaccgaggcgatcaacctggtcgcccattccttcggcagcctgatgcgtccgggccaggcggtcgtgatctcggaaatggagcatcacgccaacctggtgccctggcagatgctgcgcgaccgcgcgggcatcgaactgcgcgtggcgccgatcagcgattccggcgacctggaactggatgccctggcgcggctgctggatgacggcaaggtggcgctggtggccgtcacccacatgtccaacgtgctgggcaccatcaccccggcgcgcaagatcgcggacatcgcgcatgccgccggtgcgcgggtgctgttcgacggcagccagatggtggtccatcaccgggtggacgtgcgggcgatcgacgccgatttctacaccttcaccgggcacaagctgtacggccccacgggcatcggcgtgctgtgggggcggcgcgaactgctggaggaaatgccgcccttcctgggcgggggcgacatgatttcctccgtccggttcgagggatcgagctgggcgaccgtgccccacaagttcgaggccggcacgcccgccattatcgagaccatcgggctgggggccgccatctcctacgtcgaatcggtgggatatgacgccatcgcggcgcatgaatccgcgctgctggaccatgcgctgcggcggctgggcgaggtgcccggcctgcacgtggtggggtcgccggtcgaacgcggcggcgtgatctcgttcaccatggacgacgtgcatccgcatgacatcgccaccctgctggaccggaacggcatcgcgatccgggccggccatcattgcgcggaaccgctgatgcggcgcctggggctgtccgccaccgcgcgggccagcttcggcctctatacgacgcgcgaggaggtggacgctctggccaggacgctggagcagatccgctccttcttcctgtaa

SEQ ID NO: 848 - protein, 415 aa, Gluconacetobacter diazotrophicus
MDVSPAVMPDPIDALRARRDDFPILNERVHGKPLVFLDSAASAQKPLPVIEAMAETMRTQYANIHRGLHWMSERTTDAYEGVRDQVAGLIGAAREEIIFTRNSTEAINLVAHSFGSLMRPGQAVVISEMEHHANLVPWQMLRDRAGIELRVAPISDSGDLELDALARLLDDGKVALVAVTHMSNVLGTITPARKIADIAHAAGARVLFDGSQMVVHHRVDVRAIDADFYTFTGHKLYGPTGIGVLWGRRELLEEMPPFLGGGDMISSVRFEGSSWATVPHKFEAGTPAIIETIGLGAAISYVESVGYDAIAAHESALLDHALRRLGEVPGLHVVGSPVERGGVISFTMDDVHPHDIATLLDRNGIAIRAGHHCAEPLMRRLGLSATARASFGLYTTREEVDALARTLEQIRSFFL

SEQ ID NO: 849 - DNA, 1218 bp, Candidatus Pelagibacter ubique
gtgagtatagaaaatattaaaaaagaatttccaatatttaataataaagttcataataatgatcttgtatatcttgatagtgctaactcatctcaaaaaccacaatctgtaattgatagagttaatgatttttatacaaatgaattttcaaacacaggtagaagcgttcattacttagcagtagctgcaactaatctttatgaaaatacaagatcttctgttcaaaaatatattaacgctaaagataaaaatgaaattgtattcactaaaggtgcgactgaggcaattaatcttgtagctaatacctatggtcaaaaatttttaaaagaaggggatgaaatacttataacagaacttgaacatcattctaattacgtgccctggcattttttacgacaatctaaaggtataaagattgagtttgcagaaattaatgatgatggagagattactttagaaagcattgaaaaaaaaattacatcaaaaacaaaattaattgctattacacacttatcaaatgtaacgggatcagttttaccagttaaagaaataacagaacttgctcattcaaaaggtattgcggttttagtagatggatgccaaggtgctcctcatttaaaacttgatatgcaagacatagactgtgatttttatgctatttcttgccataaaatgtacgggccaacaggtcttggtgttttatatgcaaagaaaaagtggctagaggaattaccaccctatcaaggtggcggtggaatgattcgagatgtaaaaaaagatagcatttcatatggagatttacctaataaatatgaagctggaacaatggctacagcacaagttatagcatttgatcaatctataaaatttttagaaaaaatcggaattgaaaacatgattaaacatgagcaagaattaatccagtatggtcaagaaattttaagaaaaaataattcagttaaattaattggtaacccaaaacataggtcagcagttttgtcttttactatagaaggtgttcatccacatgacatagctacaatattggatgaagatggtgttgctattagagcaggtcatcattgttgtcaaatcctacatgacaaattaggaatacctgcaagtgcacgtgcttcattaggtgtttacaatacaaaagatgatttagatcaacttaataattctatcaataactgtaagaaaatttttaatctctaa

SEQ ID NO: 850 - protein, 405 aa, Candidatus Pelagibacter ubique
MSIENIKKEFPIFNNKVHNNDLVYLDSANSSQKPQSVIDRVNDFYTNEFSNTGRSVHYLAVAATNLYENTRSSVQKYINAKDKNEIVFTKGATEAINLVANTYGQKFLKEGDEILITELEHHSNYVPWHFLRQSKGIKIEFAEINDDGEITLESIEKKITSKTKLIAITHLSNVTGSVLPVKEITELAHSKGIAVLVDGCQGAPHLKLDMQDIDCDFYAISCHKMYGPTGLGVLYAKKKWLEELPPYQGGGGMIRDVKKDSISYGDLPNKYEAGTMATAQVIAFDQSIKFLEKIGIENMIKHEQELIQYGQEILRKNNSVKLIGNPKHRSAVLSFTIEGVHPHDIATILDEDGVAIRAGHHCCQILHDKLGIPASARASLGVYNTKDDLDQLNNSINNCKKIFNL

SEQ ID NO: 851 - DNA, 1329 bp, Kineococcus radiotolerans
gtgaccgcggaactcctggccgccccgttcagcgacgccgaactggccgcgctgcgggccgacttcccgatcctcacccgctcgacccggtcggggaagccgctggtctacctggactccggggcgacctcgcagaagccccgggccgtcctggacgcggagcggcggttctacgagacgcgcaacgccgccgtgcaccgcggcgcccaccagctcgccgaggaggccaccgacgacttcgaggccgcccgcgccgcggtcgccggtttcgtcggcgcgcccgcgcacgaggtcgtcttcaccaagaacgccaccgagtcgctgaacctcgtcgcgcacgcgttcagcaccaccaccgcctacgcgcagcggggcaccgcgcccgcgggccaggtcgtggacccgcggttcgtgctcgccgagggcgacgagatcctcgtcaccgaggccgagcaccacgccaacctcgtgccctggcaggagctctgcgcccgcacgggggccgtgctgcgctgggtcccggtcaccgacggcgggatcctcgacgtcgacgccctggaggggctggtgggggagcggacgaaggtcgtcgccttcgcccacgcctccaacgtcctcggcggggtggccccggtggcgcggctggtggcggccgcccgccgggtcggggccctcgtcgtcctcgacgcctgccagtccgtgccgcacctgcccgtcgacctgcccgcgctgggcgtggacctcgcggcgttctccgggcacaagatgctcggcccctccggggtcggggtcctctggggccgcgccgaggtgctcgatgcgatgccgccgttcctcaccggcgggtcgatgatcgagctcgtccggatggagcgctcgacgttcgccccggccccgcagaagttcgaggccggggtcccgatggcggcccaggccgtcggcctgcacgccgcggtggactacctgcgggcgctggggccggacgggtccggggtggcgcgggtcgaggcccacgagcgcgcgctgaccgcgcggttgctgggcgagctcgccgagctgccgtgggtgcgggtcctcgggccgcaggacgcggcggaccgggtgggtctggtggccttcaccgtggaggacgtgcacgcccacgacgtggggcagctcctcgacgacgagggcgtggcggtgcgcgtgggccaccactgcgcctggccgctgcaccggcgcctcggggtcacggccagcacccgggtcagcttcgggccctacaaccagggctccgacgtcgacgccgtcctgcgcgggctgcaccgggtccgcgtcctcttcgcgtga

SEQ ID NO: 852 - protein, 442 aa, Kineococcus radiotolerans
MTAELLAAPFSDAELAALRADFPILTRSTRSGKPLVYLDSGATSQKPRAVLDAERRFYETRNAAVHRGAHQLAEEATDDFEAARAAVAGFVGAPAHEVVFTKNATESLNLVAHAFSTTTAYAQRGTAPAGQVVDPRFVLAEGDEILVTEAEHHANLVPWQELCARTGAVLRWVPVTDGGILDVDALEGLVGERTKVVAFAHASNVLGGVAPVARLVAAARRVGALVVLDACQSVPHLPVDLPALGVDLAAFSGHKMLGPSGVGVLWGRAEVLDAMPPFLTGGSMIELVRMERSTFAPAPQKFEAGVPMAAQAVGLHAAVDYLRALGPDGSGVARVEAHERALTARLLGELAELPWVRVLGPQDAADRVGLVAFTVEDVHAHDVGQLLDDEGVAVRVGHHCAWPLHRRLGVTASTRVSFGPYNQGSDVDAVLRGLHRVRVLFA

SEQ ID NO: 853 - DNA, 1251 bp, Finegoldia magna
atgttagataaaaagcaagtagaagatataagaaaggactttttgtatttgagtaaagaatacaaaaatccgatagtttatttggacaatgcagctaccagccaaaaaccgatacaagttatagacagcgtaagtgaattttacaaatatgaaaacgcaaatcctcacagaggagcacacacattaagcgttttatcgacagatgtttacgaatctggaagagaaaaagtcgcgaaattcatcaacgcaacagattcttcagaaatagtattcacaagaaatactactgaatctttaaatttactagcttattcgtatggatatgaaaatttaaaagaagatgatgaaattgtcatatcaataatggagcatcacagtaatttagtaacttggcaagaagtttgcaagaaaacaggcgccaaactaaaatatttgtatgtagacaagggaaatatgcaattagattttgaagaattcaagaaaacaatcacgaaaaaaacgaaaattttctcgataacacaagcatcaaacgtagtgggaactatgcccgatgttgaaaaaatgataaaatacgttaaatcagtaaacaaggattgcatatgcatcgtggatagtgcacaatatattccacacaacaaagttgacgtacaaaaattgggatgtgatttcctagtattttcaggtcacaaaatgctaagcataatgggagtcggaatactttatggaaagaaagaattgttgaacaacctaaaaccattcttgtacggtggagacatgattgaatatgtatttgaagacaaatcatcgtacttggatgcgcctggaagatttgaggccggaacacaagatgtaggagcagtaaaatcactaatcacagcgattgattacatcgaaaaaataggaatcgaaaacattagagattatgaaaaagcattgatggattatgcttatgacaaaatcaaacaaaaatcagatattatcgatgtatacacaacaagtgatactcacagatctccagttttagattttaactttaaagaagctcatccacatgatgttgcaagtattatggacagttacggaattgcaatcagaagtggccaccattgtgcacaaccgcttcacagatatttgaagacgaatttctcatgcagagcaagctttgcattctataatacatttgaagaagttgactttttcattgaacatcttgaagacgtaaggagattgatgagaattggaactaggtag

SEQ ID NO: 854 - protein, 416 aa, Finegoldia magna
MLDKKQVEDIRKDFLYLSKEYKNPIVYLDNAATSQKPIQVIDSVSEFYKYENANPHRGAHTLSVLSTDVYESGREKVAKFINATDSSEIVFTRNTTESLNLLAYSYGYENLKEDDEIVISIMEHHSNLVTWQEVCKKTGAKLKYLYVDKGNMQLDFEEFKKTITKKTKIFSITQASNVVGTMPDVEKMIKYVKSVNKDCICIVDSAQYIPHNKVDVQKLGCDFLVFSGHKMLSIMGVGILYGKKELLNNLKPFLYGGDMIEYVFEDKSSYLDAPGRFEAGTQDVGAVKSLITAIDYIEKIGIENIRDYEKALMDYAYDKIKQKSDIIDVYTTSDTHRSPVLDFNFKEAHPHDVASIMDSYGIAIRSGHHCAQPLHRYLKTNFSCRASFAFYNTFEEVDFFIEHLEDVRRLMRIGTR

SEQ ID NO: 855 - DNA, 1326 bp, Collinsella aerofaciens
atgatcgacaccgagcacgttaaatgcgatacctgtaccgcaccggagcctatggagctcgacgccagcgacgaggcctcgcgcggctggcctaccgtcgacatcgagaccaatccctacaaggcacagttcccgctgttccagcagcaccccgagatcgccttcctcgatagtgccgccaccgcgcagcgccctgcctgcgtgctcgacgccgagcgcgacttctatcagcgcatgaacgccaaccccctgcgtggcctgtactcgctgtccgtcgaggccactgaggccatcgcgaaggtccgccagcagatcgccgacctcatcggcgctccccaggccaacgaggtcgtcttcactcgcaacacgagcgagtcgctcaacctggtcgccaagagctttgcacccacggtgctcgagcccggtgacgaggtcgtcatcaccatcatggagcaccactccaacctaatcccgtggcagcaggtctgccgcaagaccggcgccaagctcgtctacctctaccccaccaagaccggccagctcaccaccgaggaggttcttgccaaggtgggtcccaagaccaagatcctggccgtgggacaggtctccaacgtgttgggcgtcgagaacccagtcaagaacctcggcaagctcgtgcacaagtacggcggctacctggtcgtcgacggtgcgcagtcgctgccgcacatgccggtcgatgtggccgacctgggcgccgacttctttgcctttagcgcgcacaaggccatgggccccatgggcatcggcgtgctgtggggcaagatggacctgctcaacgccatgccgccagtgcttaccggcggtgagatgatcgattcggtcaccgagcaggacgccgtctgggcgcccgttcccgagaaattcgaggccggcacgcaggacgccgccggcatcttcgccacgggtgcggcactcgactacctggtcaacaccgtgggttacgagaacatccaggcccgcgagcaggcactcgtccactatctgatgggcgagctcatgcagctcgactttgtccaaatcatcggttccatctactgggacaaccaccacggcgttgtgagctttaacgtcaagggaattcacccgcacgacgtcgcgagcatcatggacatggacggcgtctgcatccgcgccggccaccactgcgcgcagccgctgctcacctggctgggcgtcgagaaccttgcctgctgccgcgccagcgtggccttctacaacgacaaggccgacatcgacaagttcgtcgccggcctgcatcacgtttggagcacgttcaatgggtaa

SEQ ID NO: 856 - protein, 441 aa, Collinsella aerofaciens
MIDTEHVKCDTCTAPEPMELDASDEASRGWPTVDIETNPYKAQFPLFQQHPEIAFLDSAATAQRPACVLDAERDFYQRMNANPLRGLYSLSVEATEAIAKVRQQIADLIGAPQANEVVFTRNTSESLNLVAKSFAPTVLEPGDEVVITIMEHHSNLIPWQQVCRKTGAKLVYLYPTKTGQLTTEEVLAKVGPKTKILAVGQVSNVLGVENPVKNLGKLVHKYGGYLVVDGAQSLPHMPVDVADLGADFFAFSAHKAMGPMGIGVLWGKMDLLNAMPPVLTGGEMIDSVTEQDAVWAPVPEKFEAGTQDAAGIFATGAALDYLVNTVGYENIQAREQALVHYLMGELMQLDFVQIIGSIYWDNHHGVVSFNVKGIHPHDVASIMDMDGVCIRAGHHCAQPLLTWLGVENLACCRASVAFYNDKADIDKFVAGLHHVWSTFNG

SEQ ID NO: 857 - DNA, 1230 bp, Peptostreptococcus micros
atgactaaaactgttcttgatattagaaaagattttccatatttgaatgaagaaaaagttggaaaaaaagttatttatttagacaatgcagctacaagtcaaaaacctcaagctgttattgatactataacaaattactattcttatcaaaacggaagtccacatagaggcagtcattatttaagtatgtctgcgactgaaatttatgagggtactagaaaaaaagttaagaattttcttaattcaaagagaacgactgaaataatttttacaaaaaatgctagtgaagcgcttaacttagttgcctattgttatcttaataaattaaaaaaagatgatgaaataatgcttagtattatggaacatcatagtaatttatgtacttggcaatttttaaaagaaaaaacaggggctaaacttaaatatatttaccttgatgataattttcaattggatatgaaatcttttgaagaaaaaatttccgataaagtaaaattggtatgtataactgctgcatcaaatgtagtagccacaatgcctgacatcaaaaaagttattgaaatcgctcataaaaacggagcaaaagttttagttgatgcatcacaaatagttgcacataaaaaactggatgttcaggatttagatgctgatttcttagccttttcaggacataaaatgttaagtgcaatgggcgttggtgtgctttatggaaagtttgacctcttaaaagaaatggatccattcctttatggaggagatatgattgaatatgtttatgaagattattcaacatatcttttgccggcaggccgttttgaagcagggacacaaaatgtaggagcagttgcttcgctaggttctgctattgactatctagaagaattgggatttgattatatagaaaaactggaaggagaacttatgaattttgcttttgaagaaatgaaaaagctagatttcataaagacttatactacaaaggacaaaaatagatgtcctgtaatagcttttaatgtaaaagatgctcatcctcatgatgtatcttcaatacttgatagctttggaattgcaataagaagtgggcatcattgtgcagagcctttgcatagatatttgaatgaaaatgcaacttgtagagtgagtttttctttctataacactaaagaagaagtagaatatttcattgataaattaaaagaagtaaggagaatattacatcttggacattag

SEQ ID NO: 858 - protein, 409 aa, Peptostreptococcus micros
MTKTVLDIRKDFPYLNEEKVGKKVIYLDNAATSQKPQAVIDTITNYYSYQNGSPHRGSHYLSMSATEIYEGTRKKVKNFLNSKRTTEIIFTKNASEALNLVAYCYLNKLKKDDEIMLSIMEHHSNLCTWQFLKEKTGAKLKYIYLDDNFQLDMKSFEEKISDKVKLVCITAASNVVATMPDIKKVIEIAHKNGAKVLVDASQIVAHKKLDVQDLDADFLAFSGHKMLSAMGVGVLYGKFDLLKEMDPFLYGGDMIEYVYEDYSTYLLPAGRFEAGTQNVGAVASLGSAIDYLEELGFDYIEKLEGELMNFAFEEMKKLDFIKTYTTKDKNRCPVIAFNVKDAHPHDVSSILDSFGIAIRSGHHCAEPLHRYLNENATCRVSFSFYNTKEEVEYFIDKLKEVRRILHLGH

SEQ ID NO: 859 - DNA, 1326 bp, Arthrobacter chlorophenolicus
ttggccgtagtatcaacgcccgccaccctggagcggtccgttccggtcatggacaacgccgaggtcctccgcatccgcaacgacttcccggtcctcaaccagacggtcaatggcaagcagctgatttaccttgactccggggcaacgtcccagaacccgctcagcgtgatcgaagccgagcaggagttctacgagcagcgcaacgccgcagtgcaccggggcgcccaccaccttgcggtcgaagccaccgaggctttcgaagacgcgcgccagaccgtggcggacctcatcggcgcggactattccgaaaccgtctggacctccaacgccacagagggcctcaaccttatttcctacgcgctgtccaacgccgcgctatgggccgcccagggccgcggaaactctgcactgaagggccttgccctgaaaccgggcgacgaaatagtggtcaccgaaatggagcaccacgccaacctcatcccgtggcaggaactggcgttccgcaccggtgcgacgctccgctacctgcccatcgacgatgccggccggctcagcctcgagcaggctgcaggaatcatcgggagccgtaccagggtgctggccttcacgcacgcctccaacgtcctcggaaccatcaatccggtccgtgaactggtggccctggcccgcgcttccaatgccctggtggtcgtggacgcctgccagtccgcgccgcacatgcccctggacgtcaaagagctggacgtggacttcgctgtcttctccggccacaagatgctcgcgcccacaggcatcggcgtgctgtacggcaggcaggaactcctggatatccttccaccgttcctcaccggcggctcaatgatcactacggtcaccatggaacgggccgaatacctcccggcgccgcagcgcttcgaggcaggcacgcagcgcatttcgcaggcggttgccctggccgccgccgccaactacctcacggagaccggcctggaccggatccaccggtgggaaatggaccttggccagcgcatggttgcaggccttgaggcgcttcccgggatccgggtactgggcccggcagccggtgaggaacggatcgggctggccgcgttcgacgtcgacggcgtccacgcccacgacgtcggacagttcctggactcgatgggcatcgccgtccgggtaggccaccactgcgcccagccgctgcaccgccggctggggctgaccgccaccacccgcgccagcgcctacctgtacaacaccaccgacgacgtagaccagttcctggacgccgtggccggcgtgcgggcctacttccgcgcttag

SEQ ID NO: 860 - protein, 441 aa, Arthrobacter chlorophenolicus
MAVVSTPATLERSVPVMDNAEVLRIRNDFPVLNQTVNGKQLIYLDSGATSQNPLSVIEAEQEFYEQRNAAVHRGAHHLAVEATEAFEDARQTVADLIGADYSETVWTSNATEGLNLISYALSNAALWAAQGRGNSALKGLALKPGDEIVVTEMEHHANLIPWQELAFRTGATLRYLPIDDAGRLSLEQAAGIIGSRTRVLAFTHASNVLGTINPVRELVALARASNALVVVDACQSAPHMPLDVKELDVDFAVFSGHKMLAPTGIGVLYGRQELLDILPPFLTGGSMITTVTMERAEYLPAPQRFEAGTQRISQAVALAAAANYLTETGLDRIHRWEMDLGQRMVAGLEALPGIRVLGPAAGEERIGLAAFDVDGVHAHDVGQFLDSMGIAVRVGHHCAQPLHRRLGLTATTRASAYLYNTTDDVDQFLDAVAGVRAYFRA

SEQ ID NO: 861 - DNA, 1284 bp, Granulibacter bethesdensis
atgaatacgaccgtcgacagggagatcgcgctgcgggagacgcagcacagcacggccggtttcgatgtggcccggatcaggcaggatttccccatcctgtcgcagacgatccgtggcaaaaagctggtgtttctggatagcggtgcctcggcccagaagccggtcagcgtgatcgaggcgatgagcgaggcgatgcgtacgcaatacgccaatgtgcatcgcggcctgcactggatgagcgagcggacgacggaagaatatgaatccacacgggatgcggtggcccgtttgctgggggcttctgcacgggaggagatcgtttttacccggaacagcacggaagcgatcaacctcgtcgctcacagctacgggcggggcatccttgcgaaaagtgaccgtcgtgccgtgctgatttcggaaatggaacatcacgccaatatcgtgccatggcaaatgctgcgggatgagacgggtgtcgagctgcgtattgctccggtaaccgatgctggcgagcttgatatggcggcttttgcgcatttgctgtcggatggcaaggtcggccttgtcgcgatcacgcatatgtccaacgtgctgggaacctatgtgccggcggcggaggtcattgccctcgcacataagcatggtgcgaaagttctgctggatggatcgcaggctgtggtgcatcgccgggtggatgtgacggcgctggatgcggatttctacgtttttaccggccacaagctctacggcccgaccggcatcggtgtactttgggcgaaacgtgaattactggaagccatgccgcctttcatgggcggtggcgacatgatcggctcagtcacgttcgagcgctccacctgggcgcaggtaccgcataaattcgaggccggtacgcccgccatcatcgaggcaatcggcctgaaagccgcgatcgcttatgtggaggcgatcggttacgaggcgctggaagcgcatgaacaggctctgacccgccatgcattggcgcgtctgaacgccatagagggcttacgtattattggccaggcggctgatcgtggtggtgtgatcagcttcgtgctcgatcatggtcatccgcatgatgtggcgacgctgctggatcgtcaggggatagcggtgcgggccggtcatcattgtgcagagccattgatgcgtcgcctgtctctctccgggacagcccgggcgacattcggggtgtacaatacccaggacgaaatcgacttctttgccgacactcttacgaaagtgagggattttctggcatga

SEQ ID NO: 862 - protein, 427 aa, Granulibacter bethesdensis
MNTTVDREIALRETQHSTAGFDVARIRQDFPILSQTIRGKKLVFLDSGASAQKPVSVIEAMSEAMRTQYANVHRGLHWMSERTTEEYESTRDAVARLLGASAREEIVFTRNSTEAINLVAHSYGRGILAKSDRRAVLISEMEHHANIVPWQMLRDETGVELRIAPVTDAGELDMAAFAHLLSDGKVGLVAITHMSNVLGTYVPAAEVIALAHKHGAKVLLDGSQAVVHRRVDVTALDADFYVFTGHKLYGPTGIGVLWAKRELLEAMPPFMGGGDMIGSVTFERSTWAQVPHKFEAGTPAIIEAIGLKAAIAYVEAIGYEALEAHEQALTRHALARLNAIEGLRIIGQAADRGGVISFVLDHGHPHDVATLLDRQGIAVRAGHHCAEPLMRRLSLSGTARATFGVYNTQDEIDFFADTLTKVRDFLA

SEQ ID NO: 863 - DNA, 1332 bp, Arthrobacter sp.
ttggtcatggtatccactcccgctaccgcagacacccaggtcgcgctaagtgatgttgaagtcctgcgtatccgcaacgactttcccgtcctggaccaggaagtcaacggcaggccccttgtttacctggattccggcgccacttctcagaacccccgcagcgtcctcgaagccgagcaggagttctacgaactgaggaatgccgcggtgcaccgcggtgcccaccaccttgccgtccaggccaccgacgccttcgaggatgcccgcgccactgtggccggtttcgtcggcgtggcggaggacgaactggtctggacagcgaacgccaccgccgggctcaatctcctcgcgtacgccttctcgaacgccagtgtcggcaccgtccggggcgaggccggccgcttcgccctcggtccgggggacgagattgtggtgacggagatggaacaccacgcgaacctgattccctggcaggagctctgccggcgcaccggtgccaccttgaaattcatccccatcgacgacgacggcgcgttgcggcttgaggaggcggcgcggcttatcaccgggcgtaccaaggtcctggcgttcacccatgcgtcaaatgtgcttggaaccatcaatccggtgcccgagctcgtgcggctggcccgggcggcaggggccctcgttgtgctggacgcctgccagtcggcgccgcacctgcccttggacttcaaggccctggacgtggacttcgcggtattctccggccacaagatgctggcgcccacggggatcggcggcgtgtacgggcggcgcgaattgttgaatgccatgcctccgttcctgaccgggggttccatgatcacgaccgtgacgatggaaaaggccgagtaccttccggcgccccagcggttcgaggccggcacccagcccatctcgcaggctgtggcgctcgcggcggccgcgaactacctgcgcgaaaccagcatggaacgaatcgccggctgggaagcgtccctgggccagcggctggtcacggggctgagcgccattgacggagtccgggtcgtggggcccgctgccggcgtagaacggctcggcctggcagccttcgacgtggccggcgtgcatgcgcacgacgtcgggcagtacctggacagcatgggcatcgccgtccgcgtgggtcaccactgcgcgcaaccgctccaccgccggctgggcctgaccgccaccacgcgggcgagcacctatttgtacaacacaacggaagaagtggacctgctgatcgaagctgtggcccaggtccggccctacttcggcgtagaaggcacggggacatccaaatga

SEQ ID NO: 864 - protein, 443 aa, Arthrobacter sp.
MVMVSTPATADTQVALSDVEVLRIRNDFPVLDQEVNGRPLVYLDSGATSQNPRSVLEAEQEFYELRNAAVHRGAHHLAVQATDAFEDARATVAGFVGVAEDELVWTANATAGLNLLAYAFSNASVGTVRGEAGRFALGPGDEIVVTEMEHHANLIPWQELCRRTGATLKFIPIDDDGALRLEEAARLITGRTKVLAFTHASNVLGTINPVPELVRLARAAGALVVLDACQSAPHLPLDFKALDVDFAVFSGHKMLAPTGIGGVYGRRELLNAMPPFLTGGSMITTVTMEKAEYLPAPQRFEAGTQPISQAVALAAAANYLRETSMERIAGWEASLGQRLVTGLSAIDGVRVVGPAAGVERLGLAAFDVAGVHAHDVGQYLDSMGIAVRVGHHCAQPLHRRLGLTATTRASTYLYNTTEEVDLLIEAVAQVRPYFGVEGTGTSK

SEQ ID NO: 865 - DNA, 1242 bp, Thermosipho melanesiensis
atgctctcgaagaatatacgggatgatttccccgttttagaaaggaagataaatggaaataacattgtatattttgatagtgctgcaagtacattaaaaccaaaaatggttatagaaaagctttcaaatttttatcttaataattacgcaaatgttcatagggcagttcatacactagcatctgaatctactcagatactagaagcttctaggaaaaaaattgcaaaatttttaaatgcacaagaggaagaagtaatttttacttctggaagtaccatgtctttaaaccttgttgtagaaagttttgtaagaagtggaatacttaacaaagatgataatgttttagtaactatggtagaacatcatgcaaatttcgttccatggattagattgtcaaagttgcatggttataatgttttagcggtttatcctagtggaaggtttggcgaattaaaattagaagattttaatgtaaaagttaatccaaaaatcgtggctataacagctcaatcaaatgttacaggtcagttgattgatataaaaaagataagagaaaaatttccaaatgcaatttttgttgtagatggtgcacaatttttacctcatgcacagattgatgtaaaagatttggatatagattttttggtattttctgctcataaaatgcttggtcctagtggtataggtgttttgtggggtaaaagagaacttctagaaaaaatggagccatttttgtatggtggagaaatgatagataaggttagtttagatgaaattacatttaatgttttgccttttagatttgaagcgggtaccccaaatattgcaggaattgcaggtttttcatttgcattggaatatttggaaaggatagaaatgaaaaaggtagaaaatcatattagaaggctaacggagtatgctttggaaaaagttagtaaaattgacggtgtagaattatatggtccacttaatgagagccaattgggtatattaagttttaatgtaaatggtgtacatccccatgatattgcgcatttgttagatgaaaagtttggaatagccgttagaagtggccatcattgtgcacaacctttaatgagtattttaaaatcccagagtaagttagacgtatttccaaatagtacatgtagggcaagtttttatgtatataacactttagatgaaattgataaactaatttatgctattaaaaaggtaaaggagtggtttgatgtactctga

SEQ ID NO: 866 - protein, 413 aa, Thermosipho melanesiensis
MLSKNIRDDFPVLERKINGNNIVYFDSAASTLKPKMVIEKLSNFYLNNYANVHRAVHTLASESTQILEASRKKIAKFLNAQEEEVIFTSGSTMSLNLVVESFVRSGILNKDDNVLVTMVEHHANFVPWIRLSKLHGYNVLAVYPSGRFGELKLEDFNVKVNPKIVAITAQSNVTGQLIDIKKIREKFPNAIFVVDGAQFLPHAQIDVKDLDIDFLVFSAHKMLGPSGIGVLWGKRELLEKMEPFLYGGEMIDKVSLDEITFNVLPFRFEAGTPNIAGIAGFSFALEYLERIEMKKVENHIRRLTEYALEKVSKIDGVELYGPLNESQLGILSFNVNGVHPHDIAHLLDEKFGIAVRSGHHCAQPLMSILKSQSKLDVFPNSTCRASFYVYNTLDEIDKLIYAIKKVKEWFDVL

SEQ ID NO: 867 - DNA, 1326 bp, Renibacterium salmoninarum
gtgagcgaatcagtaccggtccacaccgcatcgacgacaactgcgttgaccacgcaggaagtcttacgcatccggaacgactttccagtcctggatcaacaagtcaacggtcaccctttggtgtacctcgattcaggtgcgacctcgcaaaagccgctcagtgtgctggaatctgagcaagaattttacgagcagcgcaatgctgccgtgcaccggggtgcgcactggctcgcggtcgaggccacggaagcttttgaagccgcccgcgtcggcgtcgccgattttattggcgcggcggacaacgagctggtttggacttccaacgcgaccgaagcgatcaacctgattgcctattccttcagtaacgccagtatcggccaagtatctgccgaagccgagcgttttgcgctgcgtcctggtgatgaaattctcgtcaccgagatggaacatcacgccaatttggttccgtggcaagaactcgcccggcgtaccggtgcgagcctgaagttcattccgattaacgacgacggcacccttcagtctgccgatgaactgttcactgatcgcaccaaggttttcgctttcagccatgcctcgaatgtacttggcaccatcaacccggttgccgagttggtagcgaaggcgcaacaggtaggcgcgctgaccgtcttagacgcctgtcagtccgtgccgcacctgccggttgacgtcaagcagctgggcgttgattttgcggtcttttccgggcacaagatgcttgcacccaccggaatcggtgcgctgtatggccggactgaactgctcgccgcaatgccgccgttcttgaccggcggatccatgatcacctcggtaaccatggaaactgctggctatctgccgcccccgcaacgattcgaagccggcacgcaaaagatttcgcaagccattgcgcttgccgtggcggcaagttatttatccgaaacgggcatggaccggattgctgcctgggaagcgaaattgggccaacggctagtgaccggcttgagctccgttgctggcattcgagtgctgggcccgaaacccggcgaggaacgcttgggtttggccgcgttcgacgtcgagggcgtacacgcacatgacgtgggtcagttcctggatgatcgcggcatcgccgtccgggtaggtcatcattgcgcgcaaccgctccatcgcaggctgggcctgaccgcgagcacccgcgccagcagctacctttacaacaccgaagctgaggtggacgttttcttgcaagccgttgcagatgttcgagcgtactttggtgctggtgttgcggcggtgcgttcatga

SEQ ID NO: 868 - protein, 441 aa, Renibacterium salmoninarum
MSESVPVHTASTTTALTTQEVLRIRNDFPVLDQQVNGHPLVYLDSGATSQKPLSVLESEQEFYEQRNAAVHRGAHWLAVEATEAFEAARVGVADFIGAADNELVWTSNATEAINLIAYSFSNASIGQVSAEAERFALRPGDEILVTEMEHHANLVPWQELARRTGASLKFIPINDDGTLQSADELFTDRTKVFAFSHASNVLGTINPVAELVAKAQQVGALTVLDACQSVPHLPVDVKQLGVDFAVFSGHKMLAPTGIGALYGRTELLAAMPPFLTGGSMITSVTMETAGYLPPPQRFEAGTQKISQAIALAVAASYLSETGMDRIAAWEAKLGQRLVTGLSSVAGIRVLGPKPGEERLGLAAFDVEGVHAHDVGQFLDDRGIAVRVGHHCAQPLHRRLGLTASTRASSYLYNTEAEVDVFLQAVADVRAYFGAGVAAVRS

SEQ ID NO: 869 - DNA, 1281 bp, Leifsonia xyli
atgcgcaccgacactctcgacccgctacggatccgcgcggacttccctgccttcgaccgcgaggtgaacgggcatcctttcgtctacctagactccggtgccacggcgcagaagccgcggcaggtgctggaggccgaacgcaccttcgccgaaaggcacacctcggccgtgcatcgcggcgcccacaccgttgcgggcgaggcgaccgagatgttcgaggaggcccgcgcgcgcgttaccggcttcgtcggggcgcgcccggaggaactcgtctggaccgccaaagccactgagggcatcaacctcctcgcgtacgggatgtcgaacgcctctctcgggcggggcggtcccgccgccgggcgcttccgtctcggtccgggcgacgacctggtcgtgaccgaggccgagcaccacgccaacctcatcccttggcaggagctcgccgcccgcacgggcgcgaccctccgcgtcatcggcctcaccgacgacggccgcctccgcctcgatcaggccgccgagctgatcggtccacgcacccgcgtcgtcgctttcgcccacgtctcgaacgtcctcggcacggtcgcgccggtggccgagctggtcgctctcgcccacgagcacggagcgctcgctgtcctggacgcctgccagtccgttccgcacttcgccgtcgactttccggccctgggggtcgatttcgccgtcttctctggccacaagatgctgggccccaccgggatcggcgcgctctacgggcgacaggagctcctcgacgccctcccgccgttcctcaccgggggctccatgatcacgaccgtgacactggacggggccgagtaccttcccgcgccgcagcgcttcgaggcgggcacgcagcccgtctcccaggcggtcggcctcgccagcgccgtcgactacctcggcacggtcgggatggcggccatagcctcccacgaagaagcgctcggagcccgcctgctcgccgggctcggggccctcgacggcgtgcgcgtcctcggtcccggtccggggaccccccgcgtcgggctcgcgagtttcgtcgtggacggcatccacgcgcacgatgtcgggcagttcctcgacgaccgaggcatcgcggtgcgcgtcggccatcactgcgcgcagcctctgcaccgccggttcgccgtcaccgcctccacccgcatcagcacctacctttacaacacggcggatgaggtggacgccgcggtcgctgccgtcgccgacgcccgtgctttcttcggagtgatcgagtcatga

SEQ ID NO: 870 - protein, 426 aa, Leifsonia xyli
MRTDTLDPLRIRADFPAFDREVNGHPFVYLDSGATAQKPRQVLEAERTFAERHTSAVHRGAHTVAGEATEMFEEARARVTGFVGARPEELVWTAKATEGINLLAYGMSNASLGRGGPAAGRFRLGPGDDLVVTEAEHHANLIPWQELAARTGATLRVIGLTDDGRLRLDQAAELIGPRTRVVAFAHVSNVLGTVAPVAELVALAHEHGALAVLDACQSVPHFAVDFPALGVDFAVFSGHKMLGPTGIGALYGRQELLDALPPFLTGGSMITTVTLDGAEYLPAPQRFEAGTQPVSQAVGLASAVDYLGTVGMAAIASHEEALGARLLAGLGALDGVRVLGPGPGTPRVGLASFVVDGIHAHDVGQFLDDRGIAVRVGHHCAQPLHRRFAVTASTRISTYLYNTADEVDAAVAAVADARAFFGVIES

SEQ ID NO: 871 - DNA, 1203 bp, Acholeplasma laidlawii
atgatcgatgtaaagaaaataagagcacaatttccagtttattcaaaataccctgaaatgaggttttttgactctgcagccagtgcttttaaacatcaatcagtgatagaggctatgatggactatttatcctttaatggaactaacgttcaccgtggtgtatatcaacttgcagcagaatctactacaaagtatgaacatgcaagaagtgtgattgctaaatttattaatgcatccgctgaagaagtgatctttacaaagtctacaacacatagtattaacttagcagcaaacagtttaggtttaacacttcaaagtggagatgaaatcattttatccgaattagaacatcattccaacttactaccttggttagaactagcatctagattaaatttggtagttaagtttattcctttaatggatggtatgatcacgatagataactttaaaactgtcttaacaaataaaacaaaactagtcattacgcatcacatgtccaatgtgatgggttatgaaacaccacttcaagagatggcgaaattcacacatgaagttggtgctaaaattatcgtagatgctgcacaatcgattgtccacattaaaacagatgtgaaagcacttgatgtagatatgttagcctttagtggtcataaggtctatggaccaaatggtattggtgttttatacatcaaatcagggctgatgtctaaactatctccaacagaatttggtggagaaatggtggataaagttcatttagatggttcaacttggaaaagtggtgcttataaatttgaagcaggtacccctgcaattgcagaagcgataggacttgctaaagcatttgaatttatagattctattggcattgaaaacatccatcaacatgaacttcacttaagaaattatgtcgtagataaattaaaagatgaaccaggtattaccgtttttaataaacatggcgagtctacacttttatcatttaacattgatgaggtacatcctcatgacacatcaagcttcttagatcaacacggtgttgctgtaagagcaggacatcattgtaatcaacttacaatgaagtatttaaatcaagatgcaaccgtgcgtgcatcatttgcaatatacaatagtattgaagactgtgacatattaattaaagcaatccttgaaacaagagatttcttccacagcatatag

SEQ ID NO: 872 - protein, 400 aa, Acholeplasma laidlawii
MIDVKKIRAQFPVYSKYPEMRFFDSAASAFKHQSVIEAMMDYLSFNGTNVHRGVYQLAAESTTKYEHARSVIAKFINASAEEVIFTKSTTHSINLAANSLGLTLQSGDEIILSELEHHSNLLPWLELASRLNLVVKFIPLMDGMITIDNFKTVLTNKTKLVITHHMSNVMGYETPLQEMAKFTHEVGAKIIVDAAQSIVHIKTDVKALDVDMLAFSGHKVYGPNGIGVLYIKSGLMSKLSPTEFGGEMVDKVHLDGSTWKSGAYKFEAGTPAIAEAIGLAKAFEFIDSIGIENIHQHELHLRNYVVDKLKDEPGITVFNKHGESTLLSFNIDEVHPHDTSSFLDQHGVAVRAGHHCNQLTMKYLNQDATVRASFAIYNSIEDCDILIKAILETRDFFHSI

SEQ ID NO: 873 - DNA, 1251 bp, Brevibacterium linens
atgttcgctcgacttcggaacgacttcccgatcctggacaccagggtcggggagtcgcctctgagctatcttgactcgggcgcgacttcgcagaagccgcagtgtgtcatcgacacattcaccgagtactactcgcagcgcaacgccgctgtccatcgcggggcgcattcgctcgcggtgatggccaccgacgcgttcgaggccggccgggaagctgtggccaacctcgtcggcggaacaccggaacaggtgtgctggacgaagaacgccaccgaggccctcaacgtggtcgcgctcggcatcgaccgagccagccacggcttcggcggggaatccgcgcagcgcttcaacctcgggtccggcgattcgatcgtcgtgaccgagatggagcaccacgcgaacctcgtgccctggcagcagttggcgcactcgaccggcgccacgctccggtggattcccgtcactgattccggtgagctcgacctcagtgatctggacaccatcgtcgatgagaccacgaaggtcttcgccttcacccatgtctccaacgtgctcggcaccatcaacccggtcgacacactcgtcgcccgagctcgagaggtcggcgccctcgtcgtcctcgacgcgtgccaatcggtcccgcacatgcccgtgaacttcgttgacctcgatgtcgacttcgcggccttctccgcgcacaaggcactggggcccaccggcctcggcaccctgtggggcaagtcggagctgctcaatgcactgcccccggtcctgaccggcggatccatgatcaccacggtgaccatggaggattcagagttcatggacgcaccacagcgcttcgaggccggaacccagcccgtggccgaggttgcggcgttcaccaccgcggtcaactacctcgccgaggtgggcctggacaaaatcttcgaccatgagcgagacctcacccgagttctcctcgacggaatcgcagagattcccggcatcaccgtgctcggctcggccgaggaccggatcggcaccgtggccttcgacgtcgacggcgtccacgcccacgatgtcggccagtatcttgattcccagggcgtcgcggtccgggtcggtcaccactgtgctcagccgctgcaccggcgtttcggcgtcaccgccacaacccgggcgagcacctacctgtacaacaacaccgaggactgtgagcggttcctgaccgctctggccgaggtacgtcccttcttcggcgttcagtga

SEQ ID NO: 874 - protein, 416 aa, Brevibacterium linens
MFARLRNDFPILDTRVGESPLSYLDSGATSQKPQCVIDTFTEYYSQRNAAVHRGAHSLAVMATDAFEAGREAVANLVGGTPEQVCWTKNATEALNVVALGIDRASHGFGGESAQRFNLGSGDSIVVTEMEHHANLVPWQQLAHSTGATLRWIPVTDSGELDLSDLDTIVDETTKVFAFTHVSNVLGTINPVDTLVARAREVGALVVLDACQSVPHMPVNFVDLDVDFAAFSAHKALGPTGLGTLWGKSELLNALPPVLTGGSMITTVTMEDSEFMDAPQRFEAGTQPVAEVAAFTTAVNYLAEVGLDKIFDHERDLTRVLLDGIAEIPGITVLGSAEDRIGTVAFDVDGVHAHDVGQYLDSQGVAVRVGHHCAQPLHRRFGVTATTRASTYLYNNTEDCERFLTALAEVRPFFGVQ

SEQ ID NO: 875 - DNA, 1281 bp, Corynebacterium diphtheriae
atgcacacacaattcgttaccgaggctggggaacttaactctgaggctatccgcgcggaatttccaattctggcgcggacggtacgtggcgataagccactgatctatttagattctggagctacatcgcagcgtccactgcgcgtgtggaaggccgaagaacaattcgtattacatacgaatgctccggttcataggggcgcatatcaactggcagaagaagctaccgatgcatacgaagaagcgcgagatgccatcgcgagctttgttggtgctgatggctttgagcttgcttttactaaaaatgccacggaagcacttaactcagtggcgtatacgcttggcgacgaccgagctgggcagtaccaagtaaaagctggcgatacagtggtcgtgactgaacttgagcaccatgctaatctcgtcccgtggcaagaattgtgtcgtcgcactggtgcgacgcttaaatggtacaaggtgactcccgatggccgtatcgatttagattcactagaacttgatgaatcagtcaaggtagtagcttttactcatcagtccaatgtgaccggagctgtcgcgccggtcgctgaattagtcaagcgagcacgagcagtagacgcacttgtaattttggatgcttgccagtctgttccacatatggcagtcgattttcatgctctcgacgtagattttgccgcgttttcagggcataagatgtgtggtccctcaggtgtgggagcattatatggcaaagcagaaatcttagaaaagctaccaccgtttttaacgggtggatctatgatttctgtggtgactatggaagaaactacatttgccgatattccgcagcgattcgaagctggtactcagatgacgagtcaagtagtcggcctgggtgaagccgtaaagtttctttctgaaattggtatggataatatttcgcgtcacgaacacgaaatcacgaagtacgccttagagaaactttcgaagatcaaaggactagatatatatggtcctcgtacagccgaaagccgcggggcagcagttagttttgcggtaaagagaatacaccctcacgatctaggccaagtgcttgacgatcatggcgtgtgcattcgtgtagggcaccattgtgcgtggccagtacaccgtgaacttaatgcgcaatctacggcgcgggcttcattctatctttacaacactatcgacgaagttgatcgcttagtagaggctatcgaagctgcaaagaagtttttcggagtgagtgaggaaggaaagtag

SEQ ID NO: 876 - protein, 426 aa, Corynebacterium diphtheriae
MHTQFVTEAGELNSEAIRAEFPILARTVRGDKPLIYLDSGATSQRPLRVWKAEEQFVLHTNAPVHRGAYQLAEEATDAYEEARDAIASFVGADGFELAFTKNATEALNSVAYTLGDDRAGQYQVKAGDTVVVTELEHHANLVPWQELCRRTGATLKWYKVTPDGRIDLDSLELDESVKVVAFTHQSNVTGAVAPVAELVKRARAVDALVILDACQSVPHMAVDFHALDVDFAAFSGHKMCGPSGVGALYGKAEILEKLPPFLTGGSMISVVTMEETTFADIPQRFEAGTQMTSQVVGLGEAVKFLSEIGMDNISRHEHEITKYALEKLSKIKGLDIYGPRTAESRGAAVSFAVKRIHPHDLGQVLDDHGVCIRVGHHCAWPVHRELNAQSTARASFYLYNTIDEVDRLVEAIEAAKKFFGVSEEGK

SEQ ID NO: 877 - DNA, 1272 bp, Bifidobacterium animalis
atgacggatatcactgcgattcgcgatcaattccccattctcgaccagcagatcaatggccatccgctggtgtatctcgacagtggcgccacagcgcagaagccgcagtgtgtcattgacgccgaatctcgtttctacgagacggtcaacgccggcgtgcatcgcggagcccataccttggccggtctgtccaccgtcgccttcgaacaggcccgtgccaaggtggccacactcgtgggcgcctcagctgaggaaggcaacgaggagcttgtggtgaccatgggcgccaccgacggcctcaacacgctggccacggcgttcggcaacgcctcattggggcgtggtggcaaggtcgctgagcgtttcgccttgaaaccgggcgacgagatcgtcgtctcccgcgcggaacaccattccgtactgctgccattccaagaacttgcctcgcgcaccggcgccaccctcaaatggttcgatctggatgacgacggtcgcatcctctccaacaccgcagacgaggtcatcacggaacggaccaaggtggtggccgtgacccatgtgggcaatgtcaccggtgccataaccgatattgccccgattatcaaacgaacccatgaggtcggaggcgtcttcattctggacgcgtgccaatcggttccacacattccggtcgacttccatgcgttggacgtggatttcgcggtgttcagtgcccacaagatgtacggtcccactggcgtgggcttcctgtacggcaagcgcgatttgttggaggcattgcctccggccaagttcggcggttccatggtcgagctggccttcgtggacaggcctgcccagtacatggcgcctccggcacggttcgaggccgggacgcagccggtggcccaagtggtcgcagcgggtgtggcggcggaatggatgatgggcatcggcatagagacgattgccggccatgaacgcatcatcaccgaagaactgctccggcttgccgaagtcgatggagttcgcattctgggcccccaggacggaacgaaccgcatcggcacggtggcctttgaagtggatggggtgcatccgcacgatgtggggcagtacatcgacgcccaaggtatcgcgatacgtgtaggacatcattgcgcccagcccatccacaggcatttcggtgtattcgcttcgaaccgcgcgtcttcaggcatatacaacacacccgaggatgcacaggcgttggttgaggcggtggaaggtgtgcgccggttcttcctgcagtga

SEQ ID NO: 878 - protein, 423 aa, Bifidobacterium animalis
MTDITAIRDQFPILDQQINGHPLVYLDSGATAQKPQCVIDAESRFYETVNAGVHRGAHTLAGLSTVAFEQARAKVATLVGASAEEGNEELVVTMGATDGLNTLATAFGNASLGRGGKVAERFALKPGDEIVVSRAEHHSVLLPFQELASRTGATLKWFDLDDDGRILSNTADEVITERTKVVAVTHVGNVTGAITDIAPIIKRTHEVGGVFILDACQSVPHIPVDFHALDVDFAVFSAHKMYGPTGVGFLYGKRDLLEALPPAKFGGSMVELAFVDRPAQYMAPPARFEAGTQPVAQVVAAGVAAEWMMGIGIETIAGHERIITEELLRLAEVDGVRILGPQDGTNRIGTVAFEVDGVHPHDVGQYIDAQGIAIRVGHHCAQPIHRHFGVFASNRASSGIYNTPEDAQALVEAVEGVRRFFLQ

SEQ ID NO: 879 - DNA, 1239 bp, Burkholderia thailandensis
atgggtgacacgctgcgttcggccacgatggcgagcgcgttcccggcgctcgcgcagcgcgtgaacggcgcgccgctcgcctacctcgacaacgcggcgacgacgcacgtgccgcagcccgtcctcgccgcgatccgcggcttcgacgagcgcgaccgcgcgaacgttcaccgcggcgtccacacgctcagccagcgcgccaccgacgcttacgagcgcgcgcgcgacacgctcgcgcgcttcgtcggcgcgagcgacgatcacctgctcgtcttcacgtcgggcacgaccgatgcgctgaatctcgtcgcgcacgggctgtcgctcgcgggccacgcgcgcgccgtgctgcaggaaggcgacgagatcgtcgtcagcgcgctcgagcatcacgcgaatctcgtgccgtggcagatggccgcgcgccgttgcggcgcgcaactacgaatcctgcatcccgatccgcaaggccgcctgcatgtgcgggatctcgaacgattgctgacgccgcgcacgcgcgtgttcgcggtcacggcgtgctcgaacgcgacgggcgagcggccgccctatgaagcgctgctcgccatcgcgcgagcggccggcgcgctgacggtgctcgacgccgcacaggcggtcggccacgacgtgccggacttgtcggcgctcgcgtgcgacttcgccgcgttctccggccacaagatgtacgggccgatgggaacgggcgcgctcgtcggccgccgggacgcgctcgagcggctcgttccgctgcgcttcggcggcgacatggtgagctgggtcggcgagacggacgcgacgttcgacgcgctgcccgcgcggctcgaaggcggcacgccgaacgtggccggcgcggtcggaatcgcggccgccgccgactatatcgacgcgatcggccgcgcccgcatcgacgcccacgtgcgcgcgctgcgcgcgcacgcggcggcgggcctcgcggcgctcgacggcgtgaccgtactcgcgccgcacacgccgtcggcgatcgtgtcgttcgtcgccgacggcgcgcatccgcacgacatcggcacgttgctcgacgagcgcggcatcgccgtgcgcacgggctttcactgcgcgcagccgctcctcgaccggctcggctgcgggccgacgacgcgcgcgtcgttcgcgctgtacaacacgcacgacgaagtcgagcgcctcgtcgcgggcgtcgcgcaagcactgaaggtactgagatga

SEQ ID NO: 880 - protein, 412 aa, Burkholderia thailandensis
MGDTLRSATMASAFPALAQRVNGAPLAYLDNAATTHVPQPVLAAIRGFDERDRANVHRGVHTLSQRATDAYERARDTLARFVGASDDHLLVFTSGTTDALNLVAHGLSLAGHARAVLQEGDEIVVSALEHHANLVPWQMAARRCGAQLRILHPDPQGRLHVRDLERLLTPRTRVFAVTACSNATGERPPYEALLAIARAAGALTVLDAAQAVGHDVPDLSALACDFAAFSGHKMYGPMGTGALVGRRDALERLVPLRFGGDMVSWVGETDATFDALPARLEGGTPNVAGAVGIAAAADYIDAIGRARIDAHVRALRAHAAAGLAALDGVTVLAPHTPSAIVSFVADGAHPHDIGTLLDERGIAVRTGFHCAQPLLDRLGCGPTTRASFALYNTHDEVERLVAGVAQALKVLR

SEQ ID NO: 881 - DNA, 6108 bp, Lactococcus lactis
gacaattcaaaggagcgaaaaaatggctacacttgaaattaaaaatcttcatgtggcgattgaagataaagagattctcaaaggggtcaatctagtcatcaacaccaatgaaatccatgcgattatgggacctaatgggactggtaaatcaacattatctgctgcaattatgggaaatcctaattatagcgtgacacaaggagaagttctttttgacggtcaaaacgttttagaaatgagcgttgatgaaagagctcgtcttggacttttccttgccatgcaatatccatctgaaattccaggaattacgaatgcagaatttttgcgagcagcaatgaatgctaaacgtgctgaggatgacaaagtttctgttatggaatttatcaaaaaattggataaaaatatggaagttttgagcatgaaagaagaaatggctgagcgctatctcaatgaaggcttttctggtggtgaaaagaaacgtaatgaaatccttcaacttttgatgttagaaccaacttttgccattcttgatgaaattgactcaggacttgatattgatgctttaaaagttgttgctaaaggtgttaattcaatgcgtggtgagaaatttggggcattgattattacccactatcaacgtttgcttgattatattacaccagatgttgtccacattatgatggatggtcgtgtggtgaaaacaggtggcgcagaactagctaaacgtctagaaactgaaggatatgtcaatatcgctgaggaacttggattagaatataaagaagaagtttaaggaaaggagatagtaagttatttttgcttactgacagagctgtcagtaagtctaaaattcattaatttagtgacagaatgttttgtcagcaaattaatgaattcagttaagaaaatgcaaacttgctaatattaattatgaatcaagaaatcttaaacttttcacaaatgcatgctgaaccagcttggttatcagatttacgtcaaaaagctgcacttgaatttgaaaatctagaattacctaatattgaacgagtaaaaattaatcgttggggcttagaccatttaagcatttctgaaaacgaagaaattggatctgttcctacttttacggaaattccaaatcatcctttgcttgttcaagtcggaagtcaaacagttatggaacaaatgacaccaaatttggctgaacaaggcgtaattttcacagatttcaattcagctttaaccgaaattcctgaactacttgaggaaaattttggttctgtggttccatttaatgaaagtcgtttaacagcagcaaatactgtgacatttaattctggattagttctttatgttccagatggtgtggaagtacttgaacccattgaatcaattttgatgcaagagggttcatcagaagttccttttaataaacgaattttaattatcgttggaaaaaatgccaaagttgactaccttgaacgtttggaaacaagtgatgagcaaagctcaaaggcaaaagcaaatattgtcgttgaagtaattgcaaaggcaggggctcaagtcaaatttgcagccattgaccgtttaggagaaaatgttacagcttcagttgttcgtcgcggattgattggtgataatgcaacagttgactggtccgttggtgtcatgaatgatggaaatgttgttgctgactttgatagtgacctcaaagggaatggttctcattcacaaattaaagtggttgggatttcaacaggtcatcaaacgcaaggaattgatacaagagtgactaattttggtctaaattcggttggtcatatcttgcaaaatggtgtaattcttgataaaggaactttgacatttaatgccattggtcatattatcaaaggggcgaaaaatgcggatgctcaacaatcttctcacgttttaatgctttctgataaaggacgaggagatgcaaatccaattctcttgattgatgaaaatgaagtaactgcgggtcacgcagcttctgttggtcaggtagatgaggaagatttattctatcttcaatctcgtggacttgatgaagaaactgctaaacgacttgttattcgaggatttctcggttcagttgtcagtgaaattcctgtcaaatcagtccaagcagaatttattgaaactattgaaagaaagctgggcatgtaatgcttgaaggcatcaaaaaagattttccagtattgaatcaaattgttaatgatgaacctttggtctatttggacaatgcggcaactactcaaaaacctttgaaggttttggctgcgataaaagattattatgaaaatgataatgctaatgtccaccgtggtgttcatactttggcagagcgagcaactgaaaaatacgaagcggcgcgtgaaaaagtccgtcagtttatcaatgctaaatcaacaaaagaggttttgtttactagaggaacaacgacttcaatcaactgggttgctcagtttgccgggcaaatcttaaaaacaggggatgaaattgtcatttcgattatggaacaccattctaatattgttccctggcaagaggttgctaagaaaactggagcaatcttaaagtttgtctatcttaaagatggtcagctagatatggatgatttacgtaaaaaaatcactaatcaaactaaatttgtatcgattgctcatgtttctaatgtattagggacaattaatccagtagaagaaattaccaaaattgctcatgaacacggtgcttacatggcggttgatggtgcacaatctacaccacatatggcgattgaccttcaaaaaatggatgtcgatttctttgctttctcaggtcataaaatgatgggaccaactggaattggcgttctttatggcaaagaagaacttctaaatcaatttgaacctgtcgaatttgggggagaaatgattgattttgtttatgaaagtcattcaacatggacagaacttccttggaaatttgaagctggcacacctaatattgcgggtgctattgctttaggagctgcaattgattatattcaagagcttgggattgaccaaattcatcagcacgaaattgaattgattgattacctaatgccaaaacttcaagaaattgaaggcttaaagatttatggaccgaaagataatgtaaaaagaggcggtctaattgcttttaatattgaaggacttcatccacatgatgtcgcaactgcccttgatatggagggggtagctgtaagagctggtcaccattgtgctcaacctttattgaattatctcgaaactccggcaactgctagagcaagcttttatctttataatacaaaagcagattgtgataaattagttgaagcacttaaaaaaacaaaggagtttttcaaccttgattaatatgcttaattgggtcgcctccctcccactttggttggcaaccacatttttatttgttgttgttttctttagagctcaatgtactttttggttaggaaaattgagttatcatggaattttgaaaacgaagtggggcaaaaaacttgagaaaaattcagagacttccgctggaattttagccattcaaaaaatgggttggccaattattcctctgtcttttttaacagtcggttttcaaactgctgttcaatttggcgctggcctaacaaattggtcttggtataaatacacattggctgcgattccaggttacttagcttggggatttatctatgcctccggaggactaagcctatttcgttcactcgttcagggttcgattggcttactcattctatttatcatcatcattttagctgtggtaattgcagcaaacctcgtccttcgttatattcgtaaaaatggaataaaaacggatgattagagaacaagaataatcaaaaagttactgacagaaattttataagtcattaaagaaggctgtcagtaacttttagaatttatttttatcaatattaaaataaagaaagtgtgaaaatgtggctttatctaaattagataatctatatcgtgcagtaattcttgaccactcatcaaatccacgtcatgctggagaattacagacaggatgtatggttgacctcaacaatccaacctgtggtgatgtgattcgcctgactgttgaatttgaaaatgatgtcatttcaaacattgcttttagtggccatggctgcacaatctcaacagcttcagcttcaatgatgaccgttgctgttcttggaaaaacaaaagaagaagcaaaagagctggcaactattttttcagcaatggtgaccggtgaaactgacgaacgacaagaaaaacttggagatgctcagtttcttgcaggggttagtaaatttccagctcgagtaaaatgctccactctggcttggaatgccctaaaaaaagccattgatgttggtgaagcacaagaaacagtaattcatggcgaatagctaaaagttactgacagattttttatcagcaaataaaaactcgtcagtaaaactgatgagcttgtcagtagcggctgaaaaaagctttttatcaatggataaaggacttgttagtaaggctgacaagtctgtcagtaaaaagcgattgaattgagctttttatcaatggatgaaggatttgtcagcaaagctgacaagtctgtcagtaataaatatgccaaagaggaagaaaaatgacagaaaatagtacacaagaagtcgtcaaagacctcgaagaatataaatttggatttcacgataatgcagaacttgaattcacaacaggtttaggtttgaccgaagaagttattcgcgaaatttctgaaacaaaaaatgaacctgagtggatgttagagtttcgtctgaaatcttttgaagcttttaaaaaattggacatgccaaaatggggcccagatctttctggtattgattttaatgatattgtttattatcaaaaaccatcagcaaaagctgcgcgttcttgggaagacgttcctcaagaaatcaaagacacttttgaaaaaattggtattccagaagctgaacgttcatatttggcaggagcttctgctcaatatgaatcagaagttgtttatcataatatgaaagatgaatttgaaaaattaggaattattttcactgacactgattcaggattacgtgactatccagaaattttcaaaaaatatttcagcaaactcgttccaccaacggataacaaattggcagccttaaattctgccgtttggtctggagggtcatttgtctatgttcctaaaggagtcaaatgtgagattccgattcaagcttatttccgtattaacaacgaaaaatcaggacagtttgaacggacattgattattgttgaagaaggggcatctattcagtacgttgaaggatgtactgcaccaacttactctgcaagttcacttcatgcagcagtggttgaaatctttgttgaagagggtggttatatgcgctactctactattcaaaactggtcagataacgtctataatctggttaccaagcgtgctgctgcagaaaaaaatgcgacggttgaatggattgacggaaacttagggtcaaaagtatccatgaaatacccagccgttcatttgaatggaccaggagcgcgtggaacaatgctctcaatcgcttttgctggagcaaaccaaaatcaagatacaggtgctaaaatgattcataacgcaccaaatacttcaagttcaatcatttctaagtctattgccaaaaatggtggagcagtcaattaccgtggacaagttacttttggaaaaaattctaaaaaatctgcttctcatattgaatgtgacacaattttaatggatgatttatcaaaatcagataccgtaccattcaatgaaattcataattcacaagtcgccttggaacacgaggcgaaagtgtcaaaaatttcagaagaacaactctattatttgatgagtcgtggacttacagaaaaagaagcaactgacatgattgtcatgggcttcattgaaccctttaccaaagaattgccaatggaatacgctgttgaattaaatcgcttgatttcttattcaatggagggttctattgggtaa
